(19) United States
(12) Patent Application Publication
(10) Pub. No.: US 2017/0058045 A1
(43) Pub. Date: Mar. 2, 2017

(54) METHODS, COMPOSITIONS AND KITS FOR CELL SPECIFIC MODULATION OF TARGET ANTIGENS

(71) Applicant: Regeneron Pharmaceuticals, Inc., Tarrytown, NY (US)

(72) Inventors: Jesper GROMADA, Scarsdale, NY (US); Eric SMITH, New York, NY (US); Andrew MURPHY, Croton-on-Hudson, NY (US); Nicholas PAPADOPOULOS, LaGrangeville, NY (US); Joel MARTIN, Putnam Valley, NY (US); George YANCOPOULOS, Yorktown Heights, NY (US); Douglas MACDONALD, New York, NY (US); David BUCKLER, Sleepy Hollow, NY (US)

(21) Appl. No.: 15/119,986

(22) PCT Filed: Feb. 20, 2015
(86) PCT No.: PCT/US15/16737

§ 371 Date: Aug. 18, 2016

Related U.S. Application Data
(60) Provisional application No. 61/942,791, filed on Feb. 21, 2014.

(51) Int. Cl. C07K 16/32; A61K 39/395; C07K 16/28

(52) U.S. Cl. CPC C07K 16/32; C07K 16/2803; C07K 16/283; A61K 39/39558; C07K 16/2869; C07K 16/2863; C07K 16/2866; C07K 2317/31; A61K 2039/507

(57) ABSTRACT

The present invention provides, inter alia, a method for cell-specific modulation of a target antigen. The method comprises contacting a target cell having the target antigen on the surface of the target cell with: (a) first multi-specific antigen-binding polypeptide comprising: (i) a cell-specific antigen binding domain (C1), (ii) a target antigen binding domain (T1); and (b) a second multi-specific antigen-binding polypeptide comprising: (i) a cell-specific antigen binding domain (C2), (ii) a target antigen binding domain (T2); wherein C1 and C2 interact with the same cell-specific antigen, and the cell-specific antigen and the target antigen are on the same target cell. Pharmaceutical compositions and kits thereof are also included in the present invention.

### FIELD OF INVENTION

[0001] The present invention provides, inter alia, methods for cell-specific modulation of a target antigen. Pharmaceutical compositions and kits for cell-specific modulation of a target antigen are also provided.

### INCORPORATION BY REFERENCE OF SEQUENCE LISTING

[0002] This application contains references to amino acids and/or nucleic acid sequences that have been filed concurrently herewith as sequence listing text file T0018P_seq.txt, file size of approximately 874 KB, created on 20 Feb. 2014. The aforementioned sequence listing is hereby incorporated by reference in its entirety pursuant to 37 C.F.R. §1.52(e)(5).

### BACKGROUND OF THE INVENTION

[0003] Monoclonal antibody and antibody-derived therapeutics have been developed for the treatment of a variety of diseases. Many of these antibodies are mono-specific and are therefore capable of interacting, activating or interfering with a single target. Efforts have been made to develop antibodies and antibody-derived therapeutics with improved efficacy that have more than one antigen binding specificity, e.g., bi-specific and multi-specific antibodies.

[0004] The ability to direct such therapeutic molecules to specific cell types, such as cells of the prostate, breast, kidney, liver, immune system, etc. would be a powerful tool in effecting certain desired outcomes and prevent undesirable side effects. To date, little to no progress has been made in this regard.

[0005] There is, inter alia, a need for modulation of proteins in specific cells. The present invention is thus directed to these needs, as well as other related needs.

### SUMMARY OF THE INVENTION

[0006] One embodiment of the present invention is a method for cell-specific modulation of a target antigen. The method comprises contacting a target cell having the target antigen on the surface of the target cell with:

[0007] (a) a first multi-specific antigen-binding polypeptide comprising:
[0008] (i) a cell-specific antigen binding domain (C1), and
[0009] (ii) a target antigen binding domain (T1); and

[0010] (b) a second multi-specific antigen-binding polypeptide comprising:
[0011] (i) a cell-specific antigen binding domain (C2), and
[0012] (ii) a target antigen binding domain (T2),
   wherein C1 and C2 interact with the same cell-specific antigen, and the cell-specific antigen and the target antigen are on the same target cell.

[0013] Another embodiment of the present invention is a pharmaceutical composition for cell-specific modulation of a target antigen in a subject in need thereof. The pharmaceutical composition comprises a pharmaceutically acceptable diluent or carrier and an effective amount of:

[0014] (a) a first multi-specific antigen-binding polypeptide comprising:
[0015] (i) a cell-specific antigen binding domain (C1), and
[0016] (ii) a target antigen binding domain (T1); and

[0017] (b) a second multi-specific antigen-binding polypeptide comprising:
[0018] (i) a cell-specific antigen binding domain (C2), and
[0019] (ii) a target antigen binding domain (T2),
   wherein C1 and C2 interact with the same cell-specific antigen, and the cell-specific antigen and the target antigen are on the same target cell.

[0020] A further embodiment of the present invention is a kit for cell-specific modulation of a target antigen. The kit comprises, packaged together with instructions for their use:

[0021] (a) a first multi-specific antigen-binding polypeptide comprising:
[0022] (i) a cell-specific antigen binding domain (C1), and
[0023] (ii) a target antigen binding domain (T1); and

[0024] (b) a second multi-specific antigen-binding polypeptide comprising:
[0025] (i) a cell-specific antigen binding domain (C2), and
[0026] (ii) a target antigen binding domain (T2),
   wherein C1 and C2 interact with the same cell-specific antigen, and the cell-specific antigen and the target antigen are on the same target cell.

[0027] An additional embodiment of the present invention is a method for cell-specific modulation of a target antigen. The method comprises contacting a target cell having the target antigen on the surface of the target cell with:

[0028] (a) a first multi-specific antigen-binding polypeptide comprising:
[0029] (i) a cell-specific antigen binding domain (C1), and
[0030] (ii) a target antigen binding domain (T1);

[0031] (b) a second multi-specific antigen-binding polypeptide comprising:
[0032] (i) a cell-specific antigen binding domain (C2), and
[0033] (ii) a target antigen binding domain (T2),

[0034] (c) an antigen-binding polypeptide comprising:
[0035] (i) a first cell-specific antigen binding domain (C3), and
[0036] (ii) a second cell-specific antigen binding domain (C4),
   wherein the cell-specific antigens and the target antigen are on the same target cell, C1 and C3 interact with a first cell-specific antigen, and C2 and C4 interact with a second cell-specific antigen.

### BRIEF DESCRIPTION OF THE DRAWINGS

[0037] FIG. 1A shows a monomeric cell-specific antigen, H, and a homo-dimeric target antigen comprising two monomer A subunits. FIG. 1B shows a multi-specific antigen binding polypeptide, such as a bispecific antibody, comprising a cell-specific antigen binding domain (C1) linked to a target antigen binding domain (T1) and another multi-specific antigen-binding polypeptide, such as a bispecific antibody, comprising a cell-specific antigen binding domain (C2) linked to a target antigen binding domain (T2). C1 and C2 bind to different epitopes on H. T1 and T2 bind to the same epitope on two separate monomers of A. Binding of C1 and C2 to H with simultaneous binding of T1 and T2 to two separate monomers of A facilitates homodimerization of the A monomers. FIG. 1C shows an embodiment similar to that shown in FIG. 1B, except that the target antigen is a heterodimer comprising a subunit A and a subunit B. T1 binds an epitope on target monomer A and T2 binds an epitope on target monomer B. Binding of C1 and C2 to H with simultaneous binding of T1 and T2 to A and B, respectively, facilitates heterodimerization of the A and B subunits.

[0038] FIG. 2A shows a monomeric cell-specific antigen, H, and a hetero-trimeric target antigen comprising three subunits: A, B and C. C1 and C2 are cell-specific antigen binding domains specific for two different epitopes on H, while T1 and T2 are target antigen binding domains specific for epitopes on A or B, respectively. Binding of C1 and C2 to H with simultaneous binding of T1 and T2 to A and B, respectively, promotes heterotrimerization of A and B in the presence of C. FIG. 2B shows a homodimeric cell-specific antigen, H comprising two monomer H subunits. C1 and C2 are cell-specific antigen binding domains specific for two different epitopes or the same epitope on H, while T1 and T2 are target antigen binding domains specific for the same epitope on two separate monomers of A. Homodimerization of the two H subunits along with binding of C1 and C2 to the two H monomers and binding of T1 and T2 to the two A monomers, respectively, facilitates homodimerization of the A subunits.

[0039] FIG. 3A shows a heterodimeric cell-specific antigen comprising a subunit H1 and a subunit H2 and a homo-dimeric target antigen comprising two monomer A subunits. T1 and T2 are target antigen binding domains specific for the same epitope on two separate monomers of A. Heterodimerization of H1 and H2 along with binding of cell-specific binding domain C1 to H1, cell-specific binding domain C2 to H2, and binding of T1 and T2 to the two A monomers, respectively, facilitates homodimerization of the A subunits. FIG. 3B shows a cell-specific antigen comprising a subunit H which forms a heterotrimer with subunits A and B to form a heterotrimer. Cell-specific binding domains C1 and C2 bind to different epitopes on H, while target binding domains T1 and T2 bind to epitopes A and B, respectively. C1 and C2 binding to H along with simultaneous binding of T1 to A and T2 to B will facilitate heterotrimerization of the H, A, and B subunits.

[0040] FIG. 4A shows three different multi-specific antigen binding polypeptides, a cell-specific antigen H1, a separate cell specific antigen H2 that does not complex with H1, and a homodimeric target antigen comprising two monomer A subunits. (1) The first multi-specific antigen binding polypeptide comprises a cell-specific antigen binding domain C1, which binds an epitope on cell specific antigen H1, linked to a target antigen binding domain T1, which binds an epitope on monomer A. (2) The second multi-specific antigen binding polypeptide comprises a cell-specific antigen binding domain C2, which binds an epitope on cell specific antigen H2, linked to a target antigen binding domain T2, which binds an epitope on monomer A. T1 and T2 bind the same epitope on each A monomer. (3) The third multi-specific antigen binding polypeptide comprises a cell-specific antigen binding domain C3, which binds an epitope on cell specific antigen H1, linked to a cell-specific antigen binding domain C4, which binds an epitope on cell specific antigen H2. Binding of C3 and C4 to H1 and H2, thereby bringing H1 and H2 into proximity with each other, along with binding of C1 and C2 to H1 and H2, respectively, and binding of T1 and T2 to the two A monomers, respectively, facilitates homodimerization of A. FIG. 4B shows a monomeric cell-specific antigen, H, and a homo-dimeric target antigen comprising two monomer A subunits, where, instead of facilitating the homodimerization of the target antigen, binding of the multi-specific antigen binding polypeptides to their respective epitopes on A discourages the homodimerization of the target antigen, for example, by keeping the A monomers separated. C1 and C2 are cell-specific antigen binding domains specific for two different epitopes on H. T1 and T2 are target antigen binding domains specific for the same epitope on two separate monomers of A.

[0041] FIG. 5A shows a representative multi-specific antigen-binding polypeptide, such as a bispecific antibody, having a cell-specific antigen binding domain (C1), a target antigen binding domain (T1), a first multimerizing domain (M1) and a second multimerizing domain (M2). FIG. 5B shows another multi-specific antigen-binding polypeptide, such as a bispecific antibody, having a cell-specific antigen binding domain (C2), a target antigen binding domain (T2), a first multimerizing domain (M3) and a second multimerizing domain (M4).

### DETAILED DESCRIPTION OF THE INVENTION

[0042] Unless defined otherwise, all technical and scientific terms used herein have the same meaning as commonly understood by one of ordinary skill in the art to which this invention belongs.

[0043] One embodiment of the present invention is a method for cell-specific modulation of a target antigen. The method comprises contacting a target cell having the target antigen on the surface of the target cell with:

[0044] (a) a first multi-specific antigen-binding polypeptide comprising:
[0045] (i) a cell-specific antigen binding domain (C1) and
[0046] (ii) a target antigen binding domain (T1); and

[0047] (b) a second multi-specific antigen-binding polypeptide comprising:
[0048] (i) a cell-specific antigen binding domain (C2) and
[0049] (ii) a target antigen binding domain (T2),
   wherein C1 and C2 interact with the same cell-specific antigen, and the cell-specific antigen and the target antigen are on the same target cell.

[0050] As used herein, the term “modulation” refers to any alteration, variation or change in the properties or activity of the target antigen. For example, modulation, in this context, may include activation or inhibition of a target antigen, such as, e.g., a receptor.

[0051] The term “target antigen” refers to any biological molecule expressed on a cell surface that can be bound by an antigen binding polypeptide and that is a suitable target for modulation. Preferably, the target antigens of the present invention are composed of subunits that are activated by multimerization or when clustered together in a cell membrane. More preferably, the “target antigens” of the present invention include, but are not limited to, the FcERI Receptor complex, which includes the FcER1a subunit, the TrkB Receptor, the FGFR1c/FGF21/Beta Klotho complex, the CNTF Receptor complex, which includes the LIFRb and gp130 subunits, the IL-4R/IL-2Rgamma Receptor Complex and the Interferon Gamma Receptor complex, which includes the IFNR1 and IFNR2 subunits

[0052] In the context of the present invention, a “cell-specific antigen” refers to any biological molecule that can be bound by an antigen binding polypeptide and which is expressed on the surface of the same cell as the target antigen. Preferably, the “cell specific antigen” is not ubiquitously expressed on all cell types. More preferably, a cell-specific antigen of the present invention is only expressed on the surface of, for example, certain cell types defined by their anatomical origin, location, function, or disease state. For example, the cell-specific antigens of the present invention include, but are not limited to, PD-1, CD300A, Her2, PSMA, KLB, GCGR, and CNTFRa.

[0053] In the context of the present invention, a “receptor” refers to any polypeptide, typically expressed on the surface of a cell, that may or may not bind a ligand and that preferably produce downstream effector functions. “Activation” of a given receptor promotes downstream effector functions while “inhibition” of a given receptor discourages such functions. In the present invention, activation and inhibition of a receptor may be ligand-dependent, meaning that said activation and inhibition will not occur unless the receptor's ligand is bound to the receptor. Ligand-independent receptors do not require a bound ligand to be activated or inhibited and are also within the scope of the present invention.

[0054] A “target cell” of the present invention may be any cell type, cancerous or non-cancerous that expresses target antigens on its cell surface.

[0055] The term “antigen-binding polypeptide,” as used herein, refers to a polypeptide that specifically recognizes an epitope on an antigen, such as a cell-specific antigen and/or a target antigen of the present invention. The term “multi-specific” with reference to an antigen-binding polypeptide means that the polypeptide recognizes different epitopes, either on the same antigen or on different antigens. A multi-specific antigen-binding polypeptide of the present invention can be a single multifunctional polypeptide, or it can be a multimeric complex of two or more polypeptides that are covalently or non-covalently associated with one another. The term “multi-specific antigen-binding polypeptides” includes antibodies or fragments thereof of the present invention that may be linked to or co-expressed with another functional molecule, e.g., another peptide or protein. For example, an antibody or fragment thereof can be functionally linked (e.g., by chemical coupling, genetic fusion, non-covalent association or otherwise) to one or more other molecular entities, such as a protein or fragment thereof to produce a bi-specific or a multi-specific antigen-binding molecule with a second binding specificity.

[0056] As used herein, the term “epitope” refers to the portion of the antigen which is recognized by the multi-specific antigen-binding polypeptide. A single antigen (such as an antigenic polypeptide) may have more than one epitope. Epitopes may be defined as structural or functional. Functional epitopes are generally a subset of structural epitopes and are defined as those residues that directly contribute to the affinity of the interaction between the antigen-binding polypeptide and the antigen. Epitopes may also be conformational, that is, composed of non-linear amino acids. In certain embodiments, epitopes may include determinants that are chemically active surface groupings of molecules such as amino acids, sugar side chains, phosphoryl groups, or sulfonyl groups, and, in certain embodiments, may have specific three-dimensional structural characteristics, and/or specific charge characteristics. Epitopes formed from contiguous amino acids are typically retained on exposure to denaturing solvents, whereas epitopes formed by tertiary folding are typically lost on treatment with denaturing solvents.

[0057] The term “domain” refers to any part of a protein or polypeptide having a particular function or structure. Preferably, domains of the present invention bind to cell-specific or target antigens. Cell-specific antigen- or target antigen-binding domains, and the like, as used herein, include any naturally occurring, enzymatically obtainable, synthetic, or genetically engineered polypeptide or glycoprotein that specifically binds an antigen.

[0058] The terms “interact” and “bind”, which are used interchangeably herein, mean that two or more molecules form a complex that is relatively stable under physiologic conditions. In the present invention, specific binding may be characterized by an equilibrium dissociation constant (K_{D}) of at least about 10⁻⁵ M, at least about 10⁻⁶ M, at least about 10⁻⁷ M, more preferably at least about 1×10⁻⁸ M, and most preferably at least about 10⁻⁹ M. (e.g., a smaller K_{D} denotes a tighter binding). Methods for determining whether two molecules specifically bind are well known in the art and include, for example, equilibrium dialysis, surface plasmon resonance, and the like.

[0059] In one aspect of this embodiment, C1 and C2 bind different epitopes on the cell-specific antigen. In another aspect of this embodiment, T1 and T2 bind the same epitope on the target antigen.

[0060] In an additional aspect of this embodiment, the cell-specific antigen is present primarily as a monomer on the cell surface. As used herein, the term “monomer” refers to a polypeptide that does not associate with itself or other polypeptides to form complexes.

[0061] In another aspect of this embodiment, the cell-specific antigen is composed of at least two polypeptide subunits on the cell surface. In this embodiment, “on the cell surface” means that the polypeptide subunits are sufficiently accessible to the multi-specific binding polypeptides so that specific binding therebetween may occur. Thus, the specific location of the polypeptide subunits with respect to target cell is not critical, so long as they are accessible to the multispecific binding polypeptide(s) of the present invention. The term “subunit,” as used herein, refers to a polypeptide molecule that can associate with itself or other polypeptide molecules to form a complex. A cell-specific antigen composed of at least two polypeptide subunits on the cell surface may be a dimer, a trimer, a tetramer, or other multimers. Preferably, the cell-specific antigen is a homodimer on the cell surface. As used herein, a “homodimer” means a complex of two of the same polypeptide subunits.

[0062] In a further aspect of this embodiment, the target antigen is composed of at least two copies of the same polypeptide subunit on the cell surface. Preferably, the target antigen is a homodimer on the cell surface.

[0063] In an additional aspect of this embodiment, the target antigen is composed of at least two different polypeptide subunits on the cell surface. In one preferred embodiment, the target antigen is a heterodimer on the cell surface. As used herein, a “heterodimer” means a complex of two different polypeptide subunits. In another preferred embodiment, the target antigen is a heterotrimer on the cell surface. As used herein, a “heterotrimer” means a complex of three polypeptide subunits, at least two of which are different.

[0064] In a further aspect of this embodiment, the first multi-specific antigen-binding polypeptide further comprises:
[0065] (iii) a first multimerizing domain (M1) and optionally a second multimerizing domain (M2);
   and the second multi-specific antigen-binding polypeptide further comprises:
[0066] (iv) a first multimerizing domain (M3) and optionally a second multimerizing domain (M4).

[0067] The term “multimerizing domain” refers to a region of a polypeptide that associates with other polypeptides to form complexes. In one aspect, the multimerizing components M1, M2, M3, and M4 may be the same or different. See, e.g., FIG. 5. In another aspect, the multimerizing component is selected from a leucine zipper, a zinc finger, an immunoglobulin light chain constant domain, and an Fc domain. Preferably, at least one of M1, M2, M3, or M4 comprises an Fc domain of an immunoglobulin.

[0068] The immunoglobulin light chain constant domain may be a kappa chain or a lambda chain. The kappa chain or lambda chain may be a human kappa chain or lambda chain. The multimerizing component may be an Fc of an IgG. The Fc may be from an IgG of isotype IgG1, IgG2, IgG3, or IgG4. The multimerizing component may comprise a sequence selected from a human IgG1, a human IgG2, a human IgG3, a human IgG4, and a combination thereof. Further, the multimerizing component may contain a C_{H}2 and a C_{H}3 of a human IgG selected from IgG1, IgG2, IgG3, and IgG4.

[0069] Preferably, at least one of M1, M2, M3, and M4 is a polypeptide comprising an immunoglobulin C_{H}2 domain or an immunoglobulin C_{H}3 domain. The multimerizing component may contain a C_{H}2 and a C_{H}3 of a human IgG1, IgG2, IgG3, or IgG4, and may be modified as described herein. The immunoglobulin heavy chain constant domain or multimerizing fragment thereof may be human. M1, M2, M3, and M4 each independently may include an immunoglobulin heavy chain constant domain selected from C_{H}2, C_{H}3, and combinations thereof. M1, M2, M3, and M4 each independently may comprise a human C_{H}2 and C_{H}3, arranged, e.g., as found in a human Fc, e.g., in a human IgG1, IgG2, IgG3, or IgG4 Fc. M1, M2, M3, and M4 may comprise immunoglobulin constant domains, or multimerizing portions thereof, that are differentially modified, i.e., modifications present in M1 are not present in M2, M3, or M4, modifications present in M2 are not present in M1, M3, or M4, modifications present in M3 are not present in M1, M2, or M4, or modifications present in M4 are not present in M1, M2, or M3. Unless otherwise specified, modifications that are disclosed herein in connection with M1 may be used with M2, M3, or M4, and so on. That is, e.g., the modifications mentioned throughout for M1 may be used on M2, M3, or M4, and the modifications mentioned throughout for M2 may be used on M1, M3 and M4. At least one of M1, M2, M3, and M4 may comprise an immunoglobulin heavy chain constant domain that comprises a C_{H}3 region of a human IgG selected from IgG1, IgG2, IgG4, and a combination thereof, wherein the C_{H}3 region comprises a modification that reduces or eliminates binding of the second C_{H}3 domain to protein A.

[0070] In the present invention, a non-limiting example of the structure of a multi-specific antigen-binding polypeptide includes a first and a second polypeptide, the first polypeptide comprising, from N-terminal to C-terminal, a cell-specific antigen binding domain, followed by a constant region that comprises a first C_{H}3 region of a human IgG selected from IgG1, IgG2, IgG4, and combinations thereof; and, a second polypeptide comprising, from N-terminal to C-terminal, a target antigen binding domain, followed by a constant region that comprises a second C_{H}3 region of a human IgG selected from IgG1, IgG2, IgG4, and combinations thereof, wherein the second C_{H}3 region comprises a modification that reduces or eliminates binding of the second C_{H}3 domain to protein A.

[0071] The second C_{H}3 region may comprise an H95R modification (by IMGT exon numbering; H435R by EU numbering). In another example, the second C_{H}3 region further comprises a Y96F modification (IMGT; Y436F by EU).

[0072] In the present invention, the second C_{H}3 region may be from a modified human IgG1, and further comprise a modification selected from the group consisting of D16E, L18M, N44S, K52N, V57M, and V82I (IMGT; D356E, L358M, N384S, K392N, V397M, and V422I by EU).

[0073] In another example, the second C_{H}3 region may be from a modified human IgG2, and further comprise a modification selected from the group consisting of N44S, K52N, and V82I (IMGT; N384S, K392N, and V422I by EU).

[0074] In a further example, the second C_{H}3 region may be from a modified human IgG4, and further comprise a modification selected from the group consisting of QI5R, N44S, K52N, V57M, R69K, E79Q, and V82I (IMGT; Q355R, N384S, K392N, V397M, R409K, E419Q, and V422I by EU).

[0075] In another aspect of this embodiment, at least one of C1, C2, T1 or T2 comprises an epitope-binding domain selected from the group consisting of: (i) a Fab; (ii) an scFv; (iii) a diabody (dAb); (iv) a V_{H}/C_{H}1; (v) a V_{L}/C_{L}; and (vi) a domain antibody. Preferably, the epitope-binding domain is (i) a Fab or (ii) an scFv.

[0076] In a further aspect of this embodiment, at least one of the first and second multi-specific antigen-binding polypeptides is a bispecific antibody. As used herein, a “bispecific antibody” means a polypeptide that is capable of selectively binding two epitopes. Bispecific antibodies may comprise two different heavy chains, with each heavy chain specifically binding a different epitope-either on two different molecules (e.g., antigens) or on the same molecule (e.g., on the same antigen). The affinity of the bispecific antibody for one epitope is preferably at least one to two or three or four orders of magnitude lower than the affinity of bispecific antibody for the second epitope. The epitopes recognized by the bispecific antibody can be on the same or a different target (e.g., on the same or a different protein). Bispecific antibodies can be made, for example, by combining heavy chains that recognize different epitopes of the same antigen. For example, nucleic acid sequences encoding heavy chain variable sequences that recognize different epitopes of the same antigen can be fused to nucleic acid sequences encoding different heavy chain constant regions, and such sequences can be expressed in a cell that expresses an immunoglobulin light chain. A typical bispecific antibody has two heavy chains each having three heavy chain CDRs, followed by (N-terminal to C-terminal) a C_{H}1 domain, a hinge, a C_{H}2 domain, and a C_{H}3 domain, and an immunoglobulin light chain that either does not confer antigen-binding specificity but that can associate with each heavy chain, or that can associate with each heavy chain and that can bind one or more of the epitopes bound by the heavy chain antigen-binding regions, or that can associate with each heavy chain and enable binding of one or both of the heavy chains to one or both epitopes.

[0077] As noted above, one of the antigen binding domains of at least one bispecific antibody has at least a two fold lower affinity, such as three, four, five, six, seven, eight, nine, ten, twenty, thirty, forty, fifty, sixty, seventy, eighty, ninety, one hundred, two hundred, three hundred, four hundred, five hundred, six hundred, seven hundred, eight hundred, nine hundred, one thousand, five thousand, ten thousand, fifty thousand, one hundred thousand, five hundred thousand, or one million fold lower affinity, for its target relative to the other antigen binding domain in the same bispecific antibody.

[0078] In the context of the present invention, “affinity” is a measure of the strength of interaction between an antigen-binding domain and an antigen of the present invention. In the present invention, an antibody may be characterized by having specific binding activity (Kₐ) for an antigen of at least about 10⁵ mol⁻¹, 10⁶ mol⁻¹ or greater, preferably 10⁷ mol⁻¹ or greater, more preferably 10⁸ mol⁻¹ or greater, and most preferably 10⁹ mol⁻¹ or greater. The binding affinity of an antibody can be readily determined by one of ordinary skill in the art, for example, by Scatchard analysis (Scatchard, Ann. N.Y. Acad. Sci. 51: 660-72, 1949).

[0079] In another aspect of this embodiment, the cell surface density of the cell-specific antigen is lower, such as two, three, four, five, six, seven, eight, nine, ten, twenty, thirty, forty, fifty, sixty, seventy, eighty, ninety, one hundred, two hundred, three hundred, four hundred, five hundred, six hundred, seven hundred, eight hundred, nine hundred, one thousand, five thousand, ten thousand, fifty thousand, one hundred thousand, five hundred thousand, or one million fold lower, than the cell surface density of the target antigen. As used herein, cell surface “density” means the number of molecules, e.g., cell specific antigens, per unit area of the cell surface. Methods for measuring cell surface density are known in the art.

[0080] In a further aspect of this embodiment, the first and second multi-specific antigen-binding polypeptides are present in excess, such as three, four, five, six, seven, eight, nine, ten, twenty, thirty, forty, fifty, sixty, seventy, eighty, ninety, one hundred, two hundred, three hundred, four hundred, five hundred, six hundred, seven hundred, eight hundred, nine hundred, one thousand, five thousand, ten thousand, fifty thousand, one hundred thousand, five hundred thousand, or one million fold in excess, relative to the target antigen.

[0081] In another aspect of this embodiment, the target antigen is a receptor and modulation is activation of the receptor. In one preferred embodiment, activation of the receptor is ligand dependent. In another preferred embodiment, activation of the receptor is ligand independent. In a further aspect of this embodiment, the target antigen is a receptor and modulation is inhibition of the receptor.

[0082] Representative, non-limiting examples of receptors according to the present invention include FcER1a, TrkB, FGFR1c, LIFRb, IL4R, IL2Rgamma, IFNAR1, and IFNAR2.

[0083] In another aspect of this embodiment, the cell-specific antigen and the target antigen form a complex on the surface of the cell. In the present invention, a “complex” refers to a group of two or more associated polypeptides, or polypeptides and nucleic acid molecules, or polypeptides and other biological or chemical entities. One of skill in the art will appreciate that such complexes can vary regarding their stability, from very transient to virtually permanent.

[0084] In an additional aspect of this embodiment, at least one of C1 and C2 comprises a polypeptide, nucleic acid, or other biological or chemical entity that interacts with the cell-specific antigen, including, but not limited to, a ligand or portion of a ligand of the cell-specific antigen or a polypeptide or portion of a polypeptide that complexes with the cell-specific antigen on the cell surface.

[0085] In another aspect of this embodiment, at least one of T1 and T2 comprises a polypeptide, nucleic acid, or other biological or chemical entity that interacts with the target antigen, including, but not limited to, a ligand or portion of a ligand of the target antigen or a polypeptide or portion of a polypeptide that complexes with the target antigen on the cell surface. For example, T1 and/or T2 could be a portion of a ligand and the target antigen could be a receptor for that ligand.

[0086] Another embodiment of the present invention is a pharmaceutical composition for cell-specific modulation of a target antigen in a subject in need thereof. The pharmaceutical composition comprises a pharmaceutically acceptable diluent or carrier and an effective amount of:

[0087] (a) a first multi-specific antigen-binding polypeptide comprising:
[0088] (i) a cell-specific antigen binding domain (C1) and
[0089] (ii) a target antigen binding domain (T1); and

[0090] (b) a second multi-specific antigen-binding polypeptide comprising:
[0091] (i) a cell-specific antigen binding domain (C2) and
[0092] (ii) a target antigen binding domain (T2),
   wherein C1 and C2 interact with the same cell-specific antigen, and the cell-specific antigen and the target antigen are on the same target cell.

[0093] As used herein, a “subject” is a mammal, preferably, a human. In addition to humans, categories of mammals within the scope of the present invention include, for example, agricultural animals, domestic animals, laboratory animals, etc. Some examples of agricultural animals include cows, pigs, horses, goats, etc. Some examples of domestic animals include dogs, cats, etc. Some examples of laboratory animals include rats, mice, rabbits, guinea pigs, etc.

[0094] In this embodiment, the pharmaceutical compositions may be in a unit dosage form comprising both multi-specific antigen-binding polypeptides. In another aspect of this embodiment, the first multi-specific antigen-binding polypeptide is in a first unit dosage form and the second multi-specific antigen-binding polypeptide is in a second unit dosage form, separate from the first.

[0095] The first and second multi-specific antigen-binding polypeptides may be co-administered to the subject, either simultaneously or at different times, as deemed most appropriate by a physician. If the first and second multi-specific antigen-binding polypeptides are administered at different times, for example, by serial administration, the first multi-specific antigen-binding polypeptide may be administered to the subject before the second multi-specific antigen-binding polypeptide. Alternatively, the second multi-specific antigen-binding polypeptide may be administered to the subject before the first multi-specific antigen-binding polypeptide.

[0096] In this embodiment, suitable and preferred structural options for the first and second multi-specific binding polypeptides are as disclosed above.

[0097] For example, the first multi-specific antigen-binding polypeptide may further comprise:
[0098] (iii) a first multimerizing domain (M1) and optionally a second multimerizing domain (M2);
   and the second multi-specific antigen-binding polypeptide further comprises:
[0099] (iv) a first multimerizing domain (M3) and optionally a second multimerizing domain (M4).

[0100] The structure and arrangement of M1, M2, M3, and/or M4 according to the present invention are as disclosed above.

[0101] Furthermore, at least one of the first and second multi-specific antigen-binding polypeptides may be a bispecific antibody. Relative affinities of one of the antigen binding domains of the bispecific antibody for its target relative to the other antigen binding domain in the same bispecific antibody is as disclosed above.

[0102] The pharmaceutical composition, when administered to a subject, may target a receptor and modulate its activity, i.e., by activating or inhibiting the receptor, which may be ligand dependent or independent, as disclosed above. In addition, administration of the pharmaceutical composition to the subject may cause a complex to form on the surface of the target cell.

[0103] A further embodiment of the present invention is a kit for cell-specific modulation of a target antigen. The kit comprises, packaged together with instructions for their use:

[0104] (a) a first multi-specific antigen-binding polypeptide comprising:
[0105] (i) a cell-specific antigen binding domain (C1) and
[0106] (ii) a target antigen binding domain (T1); and

[0107] (b) a second multi-specific antigen-binding polypeptide comprising:
[0108] (i) a cell-specific antigen binding domain (C2) and
[0109] (ii) a target antigen binding domain (T2),
   wherein C1 and C2 interact with the same cell-specific antigen, and the cell-specific antigen and the target antigen are on the same target cell.

[0110] The kits may also include suitable storage containers, e.g., ampules, vials, tubes, etc., for each multi-specific antigen-binding polypeptide of the present invention (which may e.g., may be in the form of pharmaceutical compositions) and other reagents, e.g., buffers, balanced salt solutions, etc., for use in administering the first and second multi-specific antigen-binding polypeptides to subjects. The multi-specific antigen-binding polypeptides of the invention and other reagents may be present in the kits in any convenient form, such as, e.g., in a solution or in a powder form. The kits may further include a packaging container, optionally having one or more partitions for housing the first and second multi-specific antigen-binding polypeptides or pharmaceutical compositions of the present invention and other optional reagents.

[0111] In this embodiment, suitable and preferred structural options for the first and second multispecific binding polypeptides and pharmaceutical compositions containing the same are as disclosed above.

[0112] For example, the first multi-specific antigen-binding polypeptide may further comprise:
[0113] (iii) a first multimerizing domain (M1) and optionally a second multimerizing domain (M2);
   and the second multi-specific antigen-binding polypeptide further comprises:
[0114] (iv) a first multimerizing domain (M3) and optionally a second multimerizing domain (M4).

[0115] Suitable and preferred M1, M2, M3, and/or M4 according to the present invention are as disclosed above.

[0116] Furthermore, at least one of the first and second multi-specific antigen-binding polypeptides in the kit may be a bispecific antibody. Relative affinities of one of the antigen binding domains of the bispecific antibody for its target relative to the other antigen binding domain in the same bispecific antibody is as disclosed above.

[0117] The first and second multi-specific antigen-binding polypeptides of the kit, including pharmaceutical compositions thereof, may target a receptor and modulate its activity, i.e., by activating or inhibiting the receptor, which may be ligand dependent or independent, as disclosed above. In addition, administration of the first and second multi-specific binding polypeptides of the kit, including pharmaceutical compositions thereof, to a subject, preferably a human in need thereof, may cause a complex to form on the surface of the target cell.

[0118] An additional embodiment of the present invention is a method for cell-specific modulation of a target antigen. The method comprises contacting a target cell having the target antigen on the surface of the target cell with:

[0119] (a) a first multi-specific antigen-binding polypeptide comprising:
[0120] (i) a cell-specific antigen binding domain (C1) and
[0121] (ii) a target antigen binding domain (T1);

[0122] (b) a second multi-specific antigen-binding polypeptide comprising:
[0123] (i) a cell-specific antigen binding domain (C2) and
[0124] (ii) a target antigen binding domain (T2); and

[0125] (c) an antigen-binding polypeptide comprising:
[0126] (i) a first cell-specific antigen binding domain (C3) and
[0127] (ii) a second cell-specific antigen binding domain (C4),
   wherein the cell-specific antigens and the target antigen are on the same target cell, C1 and C3 interact with a first cell-specific antigen, and C2 and C4 interact with a second cell-specific antigen.

[0128] In one aspect of this embodiment, the first cell-specific antigen and the second cell-specific antigen are a monomers on the cell surface.

[0129] In another aspect of this embodiment, the target antigen is composed of at least two copies of the same polypeptide subunit on the cell surface. Preferably, the target antigen is a homodimer on the cell surface.

[0130] In a further aspect of this embodiment, the first multi-specific antigen-binding polypeptide further comprises
[0131] (i) a first multimerizing domain (M1) and optionally a second multimerizing domain (M2);
[0132] the second multi-specific antigen-binding polypeptide further comprises
[0133] (ii) a first multimerizing domain (M3) and optionally a second multimerizing domain (M4).
[0134] and the antigen-binding polypeptide further comprises
[0135] (iii) a first multimerizing domain (M5) and optionally a second multimerizing domain (M6).

[0136] The structure and arrangement of the multimerizing domains (M1-M6) are as described above with respect to M1-4. Preferably, however, at least one of M1, M2, M3, M4, M5, and M6 is a polypeptide comprising an immunoglobulin C_{H}2 domain or an immunoglobulin C_{H}3 domain. In another preferred embodiment, at least one of M1, M2, M3, M4, M5, or M6 comprises an Fc domain of an immunoglobulin.

[0137] C1-C4 and T1-T2 are as described above. For example, at least one of C1, C2, C3, C4, T1 or T2 may comprise an epitope-binding domain selected from the group consisting of: (i) a Fab; (ii) an scFv; (iii) a dAb; (iv) a V_{H}/CH1; (v) a V_{L}/C_{L}; and (vi) a domain antibody. Preferably, the epitope-binding domain is a Fab or an scFv.

[0138] Furthermore, at least one of the first and second multi-specific antigen-binding polypeptides may be a bispecific antibody. Preferably, one of the antigen binding domains of at least one bispecific antibody has at least a two fold lower affinity for its target relative to the other antigen binding domain in the same bispecific antibody.

[0139] In a further aspect of this embodiment, the cell surface density of the first and/or the second cell-specific antigen is lower than the cell surface density of the target antigen.

[0140] In another aspect of this embodiment, the first and second multi-specific antigen-binding polypeptides are present in excess relative to the target antigen.

[0141] In a further aspect of this embodiment, the target antigen is a receptor and modulation is activation of the receptor. In one preferred embodiment, activation of the receptor is ligand dependent. In another preferred embodiment, activation of the receptor is ligand independent.

[0142] In another aspect of this embodiment, the target antigen is a receptor and modulation is inhibition of the receptor.

[0143] In an additional aspect of this embodiment, at least one of the cell-specific antigens and the target antigen form a complex on the surface of the cell.

[0144] In a further aspect of this embodiment, at least one of C1, C2, C3 and C4 comprises a polypeptide, nucleic acid, or other biological or chemical entity that interacts with the cell-specific antigen, including, but not limited to, a ligand or portion of a ligand of the cell-specific antigen or a polypeptide or portion of a polypeptide that complexes with the cell-specific antigen on the cell surface.

[0145] In an additional aspect of this embodiment, at least one of T1 and T2 comprises a polypeptide, nucleic acid, or other biological or chemical entity that interacts with the target antigen, including, but not limited to, a ligand or portion of a ligand of the target antigen or a polypeptide or portion of a polypeptide that complexes with the target antigen on the cell surface. For example, T1 and/or T2 could be a portion of a ligand and the target antigen could be a receptor for that ligand.

[0146] An additional embodiment of the present invention is a pharmaceutical composition for cell-specific modulation of a target antigen in a subject in need thereof. The pharmaceutical composition comprises a pharmaceutically acceptable diluent or carrier and an effective amount of:

[0147] (a) a first multi-specific antigen-binding polypeptide comprising:
[0148] (i) a cell-specific antigen binding domain (C1) and
[0149] (ii) a target antigen binding domain (T1);

[0150] (b) a second multi-specific antigen-binding polypeptide comprising:
[0151] (i) a cell-specific antigen binding domain (C2) and
[0152] (ii) a target antigen binding domain (T2); and

[0153] (c) an antigen-binding polypeptide comprising:
[0154] (i) a first cell-specific antigen binding domain (C3) and
[0155] (ii) a second cell-specific antigen binding domain (C4), wherein the cell-specific antigens and the target antigen are on the same target cell, C1 and C3 interact with a first cell-specific antigen, and C2 and C4 interact with a second cell-specific antigen.

[0156] In this embodiment, suitable and preferred subjects are as disclosed herein.

[0157] In this embodiment, the pharmaceutical compositions according to the present invention may be in a unit dosage form comprising both multi-specific antigen-binding polypeptides and the antigen-binding polypeptide. In another aspect of this embodiment, the first multi-specific antigen-binding polypeptide is in a first unit dosage form; the second multi-specific antigen-binding polypeptide is in a second unit dosage form, separate from the first; and the antigen-binding polypeptide is in a third unit dosage form, separate from the first and the second.

[0158] The first and second multi-specific antigen-binding polypeptides and the antigen-binding polypeptide of the pharmaceutical composition may be co-administered to the subject, either simultaneously or at different times, as deemed most appropriate by a physician. If the first and second multi-specific antigen-binding polypeptides and the antigen-binding polypeptide are administered at different times, for example, by serial administration, the first and second multi-specific antigen-binding polypeptides may be administered to the subject in any order.

[0159] Suitable and preferred structural options for the first and second multi-specific binding polypeptides are as disclosed above.

[0160] For example, the first multi-specific antigen-binding polypeptide may further comprise:
[0161] (i) a first multimerizing domain (M1) and optionally a second multimerizing domain (M2);

[0162] the second multi-specific antigen-binding polypeptide further comprises
[0163] (ii) a first multimerizing domain (M3) and optionally a second multimerizing domain (M4).

[0164] and the antigen-binding polypeptide further comprises
[0165] (iii) a first multimerizing domain (M5) and optionally a second multimerizing domain (M6).

[0166] In one preferred embodiment, at least one of M1, M2, M3, M4, M5, and M6 is a polypeptide comprising an immunoglobulin C_{H}2 domain or an immunoglobulin C_{H}3 domain.

[0167] In another preferred embodiment, at least one of M1, M2, M3, M4, M5, or M6 comprises an Fc domain of an immunoglobulin.

[0168] In a further aspect of this embodiment, at least one of C1, C2, C3, C4, T1 or T2 comprises an epitope-binding domain selected from the group consisting of: (i) a Fab; (ii) an scFv; (iii) a dAb; (iv) a V_{H}/CH1; (v) a V_{L}/C_{L}; and (vi) a domain antibody. Preferably, the epitope-binding domain is a Fab or an scFv.

[0169] In another aspect of this embodiment, at least one of the first and second multi-specific antigen-binding polypeptides and/or the antigen-binding polypeptides in the pharmaceutical composition may be a bispecific antibody. Preferably, one of the antigen binding domains of at least one bispecific antibody of the pharmaceutical composition has at least a two fold lower affinity for its target relative to the other antigen binding domain in the same bispecific antibody.

[0170] In a further aspect of this embodiment, the cell surface density of at least one cell-specific antigen is lower than of the cell surface density of the target antigen.

[0171] In another aspect of this embodiment, the pharmaceutical composition provides the first and second multi-specific antigen-binding polypeptides in excess relative to the target antigen.

[0172] In a further aspect of this embodiment, the target antigen is a receptor and the pharmaceutical composition, when administered to a subject, modulates the receptor, e.g., by activating or inhibiting the receptor. In the present invention, the receptor may be ligand dependent or independent.

[0173] In an additional aspect of this embodiment, when the pharmaceutical composition is administered to a subject, at least one of the cell-specific antigens and the target antigen form a complex on the surface of the cell.

[0174] In a further aspect of this embodiment, at least one of C1, C2, C3 and C4 comprises a polypeptide, nucleic acid, or other biological or chemical entity that interacts with the cell-specific antigen, including, but not limited to, a ligand or portion of a ligand of the cell-specific antigen or a polypeptide or portion of a polypeptide that complexes with the cell-specific antigen on the cell surface.

[0175] In an additional aspect of this embodiment, at least one of T1 and T2 comprises a polypeptide, nucleic acid, or other biological or chemical entity that interacts with the target antigen, including, but not limited to, a ligand or portion of a ligand of the target antigen or a polypeptide or portion of a polypeptide that complexes with the target antigen on the cell surface. For example, T1 and/or T2 could be a portion of a ligand and the target antigen could be a receptor for that ligand. An additional embodiment of the present invention is a kit for cell-specific modulation of a target antigen. The kit comprises, packaged together with instructions for their use:

[0176] (a) a first multi-specific antigen-binding polypeptide comprising:
[0177] (i) a cell-specific antigen binding domain (C1) and
[0178] (ii) a target antigen binding domain (T1);

[0179] (b) a second multi-specific antigen-binding polypeptide comprising:
[0180] (i) a cell-specific antigen binding domain (C2) and
[0181] (ii) a target antigen binding domain (T2); and

[0182] (c) an antigen-binding polypeptide comprising:
[0183] (i) a first cell-specific antigen binding domain (C3) and
[0184] (ii) a second cell-specific antigen binding domain (C4), wherein C1 and C3 interact with a first cell-specific antigen, and C2 and C4 interact with a second cell-specific antigen.

[0185] In this embodiment, suitable and preferred subjects, first and second multi-specific antigen-binding polypeptides and antigen-binding polypeptides are as disclosed herein. In addition, the first and second multi-specific antigen-binding polypeptides and antigen-binding polypeptides may be in the form of a pharmaceutical composition as described above.

[0186] In one aspect of this embodiment, the first and second cell-specific antigens are monomers on the cell surface. In another aspect of this embodiment, the target antigen is composed of at least two copies of the same polypeptide subunit on the cell surface. Preferably, the target antigen is a homodimer on the cell surface.

[0187] In a further aspect of this embodiment, the first multi-specific antigen-binding polypeptide further comprises:
[0188] (iii) a first multimerizing domain (M1) and optionally a second multimerizing domain (M2);

[0189] the second multi-specific antigen-binding polypeptide further comprises
[0190] (iii) a first multimerizing domain (M3) and optionally a second multimerizing domain (M4).

[0191] and the antigen-binding polypeptide further comprises
[0192] (iii) a first multimerizing domain (M5) and optionally a second multimerizing domain (M6).

[0193] The structure and arrangement of M1-M6 are as described above. For example, at least one of M1, M2, M3, M4, M5, and M6 may be a polypeptide comprising an immunoglobulin C_{H}2 domain or an immunoglobulin C_{H}3 domain. In another preferred embodiment, at least one of M1, M2, M3, M4, M5, or M6 may comprise an Fc domain of an immunoglobulin.

[0194] The structure and arrangement of C1, C2, C3, C4, T1 and T2 are as described above. For example, at least one of C1, C2, T1 or T2 may comprise an epitope-binding domain selected from the group consisting of: (i) a Fab; (ii) an scFv; (iii) a dAb; (iv) a V_{H}/CH1; (v) a V_{L}/C_{L}; and (vi) a domain antibody. Preferably, the epitope-binding domain is a Fab or an scFv.

[0195] In another aspect of this embodiment, at least one of the first and second multi-specific antigen-binding polypeptides in the kit is a bispecific antibody. The affinity of the antigen binding domains of the bispecific antibodies is as disclosed above. For example, one of the antigen binding domains of at least one bispecific antibody has at least a two fold lower affinity for its target relative to the other antigen binding domain in the same bispecific antibody.

[0196] In a further aspect of this embodiment, the cell surface density of the first and/or the second cell-specific antigen is lower than the cell surface density of the target antigen.

[0197] In another aspect of this embodiment, the pharmaceutical composition provides the first and second multi-specific antigen-binding polypeptides in excess relative to the target antigen.

[0198] In a further aspect of this embodiment, the target antigen is a receptor and the pharmaceutical composition, when administered to a subject, modulates the receptor, e.g., by activating or inhibiting the receptor. In the present invention, the receptor may be ligand dependent or independent.

[0199] In an additional aspect of this embodiment, when the active agents of the kit are administered to a subject, at least one of the cell-specific antigens and the target antigen form a complex on the surface of the cell.

[0200] In a further aspect of this embodiment, at least one of C1, C2, C3, and C4 comprises a ligand or portion of a receptor that specifically binds the cell-specific antigen.

[0201] In an additional aspect of this embodiment, at least one of T1 and T2 comprises a ligand or portion of a receptor that specifically binds the target antigen.

[0202] In the present invention, an “effective amount” or a “therapeutically effective amount” of any of the antigen-binding polypeptides of the invention, whether or not they are multi-specific, including pharmaceutical compositions containing same (hereinafter referred to as “polypeptides of the invention” or simply “polypeptides” unless the context suggests otherwise), is an amount of such a polypeptide that is sufficient to effect beneficial or desired results as described herein when administered to a subject or provided to a cell. Effective dosage forms, modes of administration, and dosage amounts may be determined empirically, and making such determinations is within the skill of the art. It is understood by those skilled in the art that the dosage amount will vary with the route of administration, the rate of excretion, the duration of the treatment, the identity of any other drugs being administered, the age, size, and species of mammal, e.g., human patient, and like factors well known in the arts of medicine and veterinary medicine. In general, a suitable dose of a polypeptide or a pharmaceutical composition containing the same according to the invention will be that amount of a polypeptide or a pharmaceutical composition, which is the lowest dose effective to produce the desired effect. The effective dose of a polypeptide or a pharmaceutical composition containing the same of the present invention may be administered as two, three, four, five, six or more sub-doses, administered separately at appropriate intervals throughout the day.

[0203] A suitable, non-limiting example of a dosage of a polypeptide or a pharmaceutical composition containing the same disclosed herein may vary depending upon the age and the size of a subject to be administered, target disease, the purpose of the treatment, conditions, route of administration, and the like. In an adult patient, it is advantageous to intravenously or subcutaneously administer the antibody of the present invention at a single dose of about 0.01 to about 20 mg/kg body weight, more preferably about 0.02 to about 7, about 0.03 to about 5, or about 0.05 to about 3 mg/kg body weight. Depending on the severity of the condition, the frequency and the duration of the treatment can be adjusted. In certain embodiments, polypeptide or a pharmaceutical composition containing the same disclosed herein can be administered as an initial dose of at least about 0.1 mg to about 800 mg, about 1 to about 500 mg, about 5 to about 300 mg, or about 10 to about 200 mg, to about 100 mg, or to about 50 mg. In certain embodiments, the initial dose may be followed by administration of a second or a plurality of subsequent doses of the polypeptide or a pharmaceutical composition containing the same in an amount that can be approximately the same or less than that of the initial dose, wherein the subsequent doses are separated by at least 1 day to 3 days; at least one week, at least 2 weeks; at least 3 weeks; at least 4 weeks; at least 5 weeks; at least 6 weeks; at least 7 weeks; at least 8 weeks; at least 9 weeks; at least 10 weeks; at least 12 weeks; or at least 14 weeks.

[0204] The polypeptides or pharmaceutical compositions containing same of the present invention may be administered in any desired and effective manner: for oral ingestion, or as an ointment or drop for local administration to the eyes, or for parenteral or other administration in any appropriate manner such as intraperitoneal, subcutaneous, topical, intradermal, inhalation, intrapulmonary, rectal, vaginal, sublingual, intramuscular, intravenous, intraarterial, intrathecal, or intralymphatic. Further, the polypeptides or pharmaceutical compositions containing same of the present invention may be administered in conjunction with other treatments. The polypeptides or the pharmaceutical compositions of the present invention may be encapsulated or otherwise protected against gastric or other secretions, if desired.

[0205] The pharmaceutical compositions of the invention comprise one or more active ingredients, e.g. polypeptides, in admixture with one or more pharmaceutically-acceptable diluents or carriers and, optionally, one or more other compounds, drugs, ingredients and/or materials. Regardless of the route of administration selected, the polypeptides of the present invention are formulated into pharmaceutically-acceptable dosage forms by conventional methods known to those of skill in the art. See, e.g., Remington, The Science and Practice of Pharmacy (21^{st} Edition, Lippincott Williams and Wilkins, Philadelphia, Pa.).

[0206] Pharmaceutically acceptable diluents or carriers are well known in the art (see, e.g., Remington, The Science and Practice of Pharmacy (21^{st} Edition, Lippincott Williams and Wilkins, Philadelphia, Pa.) and The National Formulary (American Pharmaceutical Association, Washington, D.C.)) and include sugars (e.g., lactose, sucrose, mannitol, and sorbitol), starches, cellulose preparations, calcium phosphates (e.g., dicalcium phosphate, tricalcium phosphate and calcium hydrogen phosphate), sodium citrate, water, aqueous solutions (e.g., saline, sodium chloride injection, Ringer's injection, dextrose injection, dextrose and sodium chloride injection, lactated Ringer's injection), alcohols (e.g., ethyl alcohol, propyl alcohol, and benzyl alcohol), polyols (e.g., glycerol, propylene glycol, and polyethylene glycol), organic esters (e.g., ethyl oleate and tryglycerides), biodegradable polymers (e.g., polylactide-polyglycolide, poly(orthoesters), and poly(anhydrides)), elastomeric matrices, liposomes, microspheres, oils (e.g., corn, germ, olive, castor, sesame, cottonseed, and groundnut), cocoa butter, waxes (e.g., suppository waxes), paraffins, silicones, talc, silicylate, etc. Each pharmaceutically acceptable diluent or carrier used in a pharmaceutical composition of the invention must be “acceptable” in the sense of being compatible with the other ingredients of the formulation and not injurious to the subject. Diluents or carriers suitable for a selected dosage form and intended route of administration are well known in the art, and acceptable diluents or carriers for a chosen dosage form and method of administration can be determined using ordinary skill in the art.

[0207] The pharmaceutical compositions of the invention may, optionally, contain additional ingredients and/or materials commonly used in pharmaceutical compositions. These ingredients and materials are well known in the art and include (1) fillers or extenders, such as starches, lactose, sucrose, glucose, mannitol, and silicic acid; (2) binders, such as carboxymethylcellulose, alginates, gelatin, polyvinyl pyrrolidone, hydroxypropylmethyl cellulose, sucrose and acacia; (3) humectants, such as glycerol; (4) disintegrating agents, such as agar-agar, calcium carbonate, potato or tapioca starch, alginic acid, certain silicates, sodium starch glycolate, cross-linked sodium carboxymethyl cellulose and sodium carbonate; (5) solution retarding agents, such as paraffin; (6) absorption accelerators, such as quaternary ammonium compounds; (7) wetting agents, such as cetyl alcohol and glycerol monostearate; (8) absorbents, such as kaolin and bentonite clay; (9) lubricants, such as talc, calcium stearate, magnesium stearate, solid polyethylene glycols, and sodium lauryl sulfate; (10) suspending agents, such as ethoxylated isostearyl alcohols, polyoxyethylene sorbitol and sorbitan esters, microcrystalline cellulose, aluminum metahydroxide, bentonite, agar-agar and tragacanth; (11) buffering agents; (12) excipients, such as lactose, milk sugars, polyethylene glycols, animal and vegetable fats, oils, waxes, paraffins, cocoa butter, starches, tragacanth, cellulose derivatives, polyethylene glycol, silicones, bentonites, silicic acid, talc, salicylate, zinc oxide, aluminum hydroxide, calcium silicates, and polyamide powder; (13) inert diluents, such as water or other solvents; (14) preservatives; (15) surface-active agents; (16) dispersing agents; (17) control-release or absorption-delaying agents, such as hydroxypropylmethyl cellulose, other polymer matrices, biodegradable polymers, liposomes, microspheres, aluminum monostearate, gelatin, and waxes; (18) opacifying agents; (19) adjuvants; (20) wetting agents; (21) emulsifying and suspending agents; (22), solubilizing agents and emulsifiers, such as ethyl alcohol, isopropyl alcohol, ethyl carbonate, ethyl acetate, benzyl alcohol, benzyl benzoate, propylene glycol, 1,3-butylene glycol, oils (in particular, cottonseed, groundnut, corn, germ, olive, castor and sesame oils), glycerol, tetrahydrofuryl alcohol, polyethylene glycols and fatty acid esters of sorbitan; (23) propellants, such as chlorofluorohydrocarbons and volatile unsubstituted hydrocarbons, such as butane and propane; (24) antioxidants; (25) agents which render the formulation isotonic with the blood of the intended recipient, such as sugars and sodium chloride; (26) thickening agents; (27) coating materials, such as lecithin; and (28) sweetening, flavoring, coloring, perfuming and preservative agents. Each such ingredient or material must be “acceptable” in the sense of being compatible with the other ingredients of the formulation and not injurious to the subject. Ingredients and materials suitable for a selected dosage form and intended route of administration are well known in the art, and acceptable ingredients and materials for a chosen dosage form and method of administration may be determined using ordinary skill in the art.

[0208] The pharmaceutical compositions of the present invention suitable for oral administration may be in the form of capsules, cachets, pills, tablets, powders, granules, a solution or a suspension in an aqueous or non-aqueous liquid, an oil-in-water or water-in-oil liquid emulsion, an elixir or syrup, a pastille, a bolus, an electuary or a paste. These formulations may be prepared by methods known in the art, e.g., by means of conventional pan-coating, mixing, granulation or lyophilization processes.

[0209] Solid dosage forms for oral administration (capsules, tablets, pills, dragees, powders, granules and the like) may be prepared, e.g., by mixing the active ingredient(s) with one or more pharmaceutically-acceptable diluents or carriers and, optionally, one or more fillers, extenders, binders, humectants, disintegrating agents, solution retarding agents, absorption accelerators, wetting agents, absorbents, lubricants, and/or coloring agents. Solid compositions of a similar type may be employed as fillers in soft and hard-filled gelatin capsules using a suitable excipient. A tablet may be made by compression or molding, optionally with one or more accessory ingredients. Compressed tablets may be prepared using a suitable binder, lubricant, inert diluent, preservative, disintegrant, surface-active or dispersing agent. Molded tablets may be made by molding in a suitable machine. The tablets, and other solid dosage forms, such as dragees, capsules, pills and granules, may optionally be scored or prepared with coatings and shells, such as enteric coatings and other coatings well known in the pharmaceutical-formulating art. They may also be formulated so as to provide slow or controlled release of the active ingredient therein. They may be sterilized by, for example, filtration through a bacteria-retaining filter. These compositions may also optionally contain opacifying agents and may be of a composition such that they release the active ingredient only, or preferentially, in a certain portion of the gastrointestinal tract, optionally, in a delayed manner. The active ingredient can also be in microencapsulated form.

[0210] Liquid dosage forms for oral administration include pharmaceutically-acceptable emulsions, microemulsions, solutions, suspensions, syrups and elixirs. The liquid dosage forms may contain suitable inert diluents commonly used in the art. Besides inert diluents, the oral compositions may also include adjuvants, such as wetting agents, emulsifying and suspending agents, sweetening, flavoring, coloring, perfuming and preservative agents. Suspensions may contain suspending agents.

[0211] The pharmaceutical compositions of the present invention for rectal or vaginal administration may be presented as a suppository, which may be prepared by mixing one or more active ingredient(s) with one or more suitable nonirritating diluents or carriers which are solid at room temperature, but liquid at body temperature and, therefore, will melt in the rectum or vaginal cavity and release the active compound. The pharmaceutical compositions of the present invention which are suitable for vaginal administration also include pessaries, tampons, creams, gels, pastes, foams or spray formulations containing such pharmaceutically-acceptable diluents or carriers as are known in the art to be appropriate.

[0212] Dosage forms for the topical or transdermal administration include powders, sprays, ointments, pastes, creams, lotions, gels, solutions, patches, drops and inhalants. The active agent(s)/compound(s) may be mixed under sterile conditions with a suitable pharmaceutically-acceptable diluent or carrier. The ointments, pastes, creams and gels may contain excipients. Powders and sprays may contain excipients and propellants.

[0213] Various other delivery systems are known and can be used to administer the pharmaceutical composition of the invention, e.g., encapsulation in liposomes, microparticles, microcapsules, recombinant cells capable of expressing the mutant viruses, receptor mediated endocytosis (see, e.g., Wu et al. (1987) J. Biol. Chem. 262:4429-4432). Methods of introduction include, but are not limited to, intradermal, intramuscular, intraperitoneal, intravenous, subcutaneous, intranasal, epidural, and oral routes. The composition may be administered by any convenient route, for example by infusion or bolus injection, by absorption through epithelial or mucocutaneous linings (e.g., oral mucosa, rectal and intestinal mucosa, etc.) and may be administered together with other biologically active agents. Administration can be systemic or local.

[0214] The pharmaceutical composition can be also delivered in a vesicle, in particular a liposome (see Langer (1990) Science 249:1527-1533; Treat et al. (1989) in Liposomes in the Therapy of Infectious Disease and Cancer, Lopez Berestein and Fidler (eds.), Liss, New York, pp. 353-365; Lopez-Berestein, ibid., pp. 317-327; see generally ibid.).

[0215] In certain situations, the pharmaceutical composition can be delivered in a controlled release system. In one embodiment, a pump may be used (see Langer, supra; Sefton (1987) CRC Crit. Ref Biomed. Eng. 14:201). In another embodiment, polymeric materials can be used; see, Medical Applications of Controlled Release, Langer and Wise (eds.), CRC Pres., Boca Raton, Fla. (1974). In yet another embodiment, a controlled release system can be placed in proximity of the composition's target, thus requiring only a fraction of the systemic dose (see, e.g., Goodson, in Medical Applications of Controlled Release, supra, vol. 2, pp. 115-138, 1984).

[0216] The injectable preparations may include dosage forms for intravenous, subcutaneous, intracutaneous and intramuscular injections, drip infusions, etc. These injectable preparations may be prepared by methods publicly known. For example, the injectable preparations may be prepared, e.g., by dissolving, suspending or emulsifying the antibody or its salt described above in a sterile aqueous medium or an oily medium conventionally used for injections. As the aqueous medium for injections, there are, for example, physiological saline, an isotonic solution containing glucose and other auxiliary agents, etc., which may be used in combination with an appropriate solubilizing agent such as an alcohol (e.g., ethanol), a polyalcohol (e.g., propylene glycol, polyethylene glycol), a nonionic surfactant [e.g., polysorbate 80, HCO-50 (polyoxyethylene (50 mol) adduct of hydrogenated castor oil)], etc. As the oily medium, there are employed, e.g., sesame oil, soybean oil, etc., which may be used in combination with a solubilizing agent such as benzyl benzoate, benzyl alcohol, etc. The injection thus prepared is preferably filled in an appropriate ampoule. A pharmaceutical composition of the present invention can be delivered subcutaneously or intravenously with a standard needle and syringe. In addition, with respect to subcutaneous delivery, a pen delivery device readily has applications in delivering a pharmaceutical composition of the present invention. Such a pen delivery device can be reusable or disposable. A reusable pen delivery device generally utilizes a replaceable cartridge that contains a pharmaceutical composition. Once all of the pharmaceutical composition within the cartridge has been administered and the cartridge is empty, the empty cartridge can readily be discarded and replaced with a new cartridge that contains the pharmaceutical composition. The pen delivery device can then be reused. In a disposable pen delivery device, there is no replaceable cartridge. Rather, the disposable pen delivery device comes prefilled with the pharmaceutical composition held in a reservoir within the device. Once the reservoir is emptied of the pharmaceutical composition, the entire device is discarded.

[0217] Numerous reusable pen and autoinjector delivery devices have applications in the subcutaneous delivery of a pharmaceutical composition of the present invention. Examples include, but certainly are not limited to AUTOPEN™ (Owen Mumford, Inc., Woodstock, UK), DISETRONIC™ pen (Disetronic Medical Systems, Burghdorf, Switzerland), HUMALOG MIX 75/25™ pen, HUMALOG™ pen, HUMALIN 70/30™ pen (Eli Lilly and Co., Indianapolis, Ind.), NOVOPEN™ I, II and III (Novo Nordisk, Copenhagen, Denmark), NOVOPEN JUNIOR™ (Novo Nordisk, Copenhagen, Denmark), BD™ pen (Becton Dickinson, Franklin Lakes, N.J.), OPTIPENT™, OPTIPEN PRO™, OPTIPEN STARLET™, and OPTICLIK™ (sanofi-aventis, Frankfurt, Germany), to name only a few. Examples of disposable pen delivery devices having applications in subcutaneous delivery of a pharmaceutical composition of the present invention include, but certainly are not limited to the SOLOSTAR™ pen (sanofi-aventis), the FLEXPEN™ (Novo Nordisk), and the KWIKPEN™ (Eli Lilly).

[0218] Advantageously, the pharmaceutical compositions for oral or parenteral use described above are prepared into dosage forms in a unit dose suited to fit a dose of the active ingredients. Such dosage forms in a unit dose include, for example, tablets, pills, capsules, injections (ampoules), suppositories, etc. The amount of the aforesaid antibody contained is generally about 0.1 to about 800 mg per dosage form in a unit dose; especially in the form of injection, the aforesaid antibody is contained in about 1 to about 500 mg, in about 5 to 300 mg, in about 8 to 200 mg, and in about 10 to about 100 mg for the other dosage forms.

[0219] In some cases, in order to prolong the effect of a drug (e.g., pharmaceutical formulation), it is desirable to slow its absorption from subcutaneous or intramuscular injection. This may be accomplished by the use of a liquid suspension of crystalline or amorphous material having poor water solubility.

[0220] The rate of absorption of the active agent/drug then depends upon its rate of dissolution which, in turn, may depend upon crystal size and crystalline form. Alternatively, delayed absorption of a parenterally-administered agent/drug may be accomplished by dissolving or suspending the active agent/drug in an oil vehicle. Injectable depot forms may be made by forming microencapsule matrices of the active ingredient in biodegradable polymers. Depending on the ratio of the active ingredient to polymer, and the nature of the particular polymer employed, the rate of active ingredient release can be controlled. Depot injectable formulations are also prepared by entrapping the drug in liposomes or microemulsions which are compatible with body tissue. The injectable materials can be sterilized for example, by filtration through a bacterial-retaining filter.

[0221] The formulations may be presented in unit-dose or multi-dose sealed containers, for example, ampules and vials, and may be stored in a lyophilized condition requiring only the addition of the sterile liquid diluent or carrier, for example water for injection, immediately prior to use. Extemporaneous injection solutions and suspensions may be prepared from sterile powders, granules and tablets of the type described above.

### ADDITIONAL DEFINITIONS

[0222] As used herein, terms “polypeptide,” “peptide” and “protein” are used interchangeably herein to refer to a polymer of amino acid residues. The terms apply to amino acid polymers in which one or more amino acid residue is an artificial chemical mimetic of a corresponding naturally occurring amino acid, as well as to naturally occurring amino acid polymers, those containing modified residues, and non-naturally occurring amino acid polymers.

[0223] As applied to polypeptides, the term “substantial similarity” or “substantially similar” means that two peptide sequences, when optimally aligned, such as by the programs GAP or BESTFIT using default gap weights, share at least 90% sequence identity, even more preferably at least 95%, 98% or 99% sequence identity. Preferably, residue positions, which are not identical, differ by conservative amino acid substitutions. A “conservative amino acid substitution” is one in which an amino acid residue is substituted by another amino acid residue having a side chain (R group) with similar chemical properties (e.g., charge or hydrophobicity). In general, a conservative amino acid substitution will not substantially change the functional properties of a polypeptide. In cases where two or more amino acid sequences differ from each other by conservative substitutions, the percent or degree of similarity may be adjusted upwards to correct for the conservative nature of the substitution. Means for making this adjustment are well known to those of skill in the art. See, e.g., Pearson (1994) Methods Mol. Biol. 24: 307-331, which is herein incorporated by reference. Examples of groups of amino acids that have side chains with similar chemical properties include 1) aliphatic side chains: glycine, alanine, valine, leucine and isoleucine; 2) aliphatic-hydroxyl side chains: serine and threonine; 3) amide-containing side chains: asparagine and glutamine; 4) aromatic side chains: phenylalanine, tyrosine, and tryptophan; 5) basic side chains: lysine, arginine, and histidine; 6) acidic side chains: aspartate and glutamate, and 7) sulfur-containing side chains: cysteine and methionine. Preferred conservative amino acids substitution groups are: valine-leucine-isoleucine, phenylalanine-tyrosine, lysine-arginine, alanine-valine, glutamate-aspartate, and asparagine-glutamine. Alternatively, a conservative replacement is any change having a positive value in the PAM250 log-likelihood matrix disclosed in Gonnet et al. (1992) Science 256: 1443 45, herein incorporated by reference. A “moderately conservative” replacement is any change having a nonnegative value in the PAM250 log-likelihood matrix.

[0224] Sequence similarity for polypeptides is typically measured using sequence analysis software. Protein analysis software matches similar sequences using measures of similarity assigned to various substitutions, deletions and other modifications, including conservative amino acid substitutions. For instance, GCG software contains programs such as GAP and BESTFIT which can be used with default parameters to determine sequence homology or sequence identity between closely related polypeptides, such as homologous polypeptides from different species of organisms or between a wild type protein and a mutein thereof. See, e.g., GCG Version 6.1. Polypeptide sequences also can be compared using FASTA with default or recommended parameters; a program in GCG Version 6.1. FASTA (e.g., FASTA2 and FASTA3) provides alignments and percent sequence identity of the regions of the best overlap between the query and search sequences (Pearson (2000) supra). Another preferred algorithm when comparing a sequence of the invention to a database containing a large number of sequences from different organisms is the computer program BLAST, especially BLASTP or TBLASTN, using default parameters. See, e.g., Altschul et al. (1990) J. Mol. Biol. 215: 403-410 and (1997) Nucleic Acids Res. 25:3389-3402, each of which is herein incorporated by reference.

[0225] The term “amino acid” means naturally occurring and synthetic amino acids, as well as amino acid analogs and amino acid mimetics that function similarly to the naturally occurring amino acids. Naturally occurring amino acids are those encoded by the genetic code, as well as those amino acids that are later modified, e.g., hydroxyproline, gamma-carboxyglutamate, and O-phosphoserine. An “amino acid analog” means compounds that have the same basic chemical structure as a naturally occurring amino acid, e.g., a carbon that is bound to a hydrogen, a carboxyl group, an amino group, and an R group, e.g., homoserine, norleucine, methionine sulfoxide, methionine methyl sulfonium. Such analogs may have modified R groups (e.g., norleucine) or modified peptide backbones, but retain the same basic chemical structure as a naturally occurring amino acid. An “amino acid mimetic” means a chemical compound that has a structure that is different from the general chemical structure of an amino acid, but that functions similarly to a naturally occurring amino acid.

[0226] The term “antibody”, as used herein, is intended to refer to immunoglobulin molecules comprised of four polypeptide chains, two heavy (H) chains and two light (L) chains inter-connected by disulfide bonds (i.e., “full antibody molecules”), as well as multimers thereof (e.g. IgM) or antigen-binding fragments thereof. Each heavy chain is comprised of a heavy chain variable region (“HCVR” or “V_{H}”) and a heavy chain constant region (comprised of domains CH1, CH2 and CH3). Each light chain is comprised of a light chain variable region (“LCVR or “V_{L}”) and a light chain constant region (C_{L}). The V_{H} and V_{L} regions can be further subdivided into regions of hypervariability, termed complementarity determining regions (CDR), interspersed with regions that are more conserved, termed framework regions (FR). Each V_{H} and V_{L} is composed of three CDRs and four FRs, arranged from amino-terminus to carboxy-terminus in the following order: FR1, CDR1, FR2, CDR2, FR3, CDR3, FR4. In certain embodiments of the invention, the FRs of the antibody (or antigen binding fragment thereof) may be identical to the human germline sequences, or may be naturally or artificially modified. An amino acid consensus sequence may be defined based on a side-by-side analysis of two or more CDRs.

[0227] Substitution of one or more CDR residues or omission of one or more CDRs is also possible. Antibodies have been described in the scientific literature in which one or two CDRs can be dispensed with for binding. Padlan et al. (1995 FASEB J. 9:133-139) analyzed the contact regions between antibodies and their antigens, based on published crystal structures, and concluded that only about one fifth to one third of CDR residues actually contact the antigen. Padlan also found many antibodies in which one or two CDRs had no amino acids in contact with an antigen (see also, Vajdos et al. 2002 J Mol Biol 320:415-428).

[0228] CDR residues not contacting antigen can be identified based on previous studies (for example residues H60-H65 in CDRH2 are often not required), from regions of Kabat CDRs lying outside Chothia CDRs, by molecular modeling and/or empirically. If a CDR or residue(s) thereof is omitted, it is usually substituted with an amino acid occupying the corresponding position in another human antibody sequence or a consensus of such sequences. Positions for substitution within CDRs and amino acids to substitute can also be selected empirically. Empirical substitutions can be conservative or non-conservative substitutions.

[0229] Full length antibodies can be proteolytically digested down to several discrete, functional antibody fragments, which retain the ability to recognize the antigen. For example, the enzyme papain can be used to cleave a full length immunoglobulin into two Fab fragments and an Fc fragment. Thus, the Fab fragment is typically composed of two variable domains and two constant domains from the heavy and light chains. The Fv region is usually recognized as a component of the Fab region and typically comprises two variable domains, one from each of the heavy (V_{H}) and light (V_{L}) chains. The enzyme pepsin cleaves below the hinge region, so a F(ab′)₂ fragment and a pFc′ fragment is formed. F(ab′)₂ fragments are intact antibodies that have been digested, removing the constant (Fc) region. Two Fab′ fragments can then result from further digestion of F(ab′)₂ fragments. As used herein, “antibody fragments” means a portion of the full length antibody that retains the ability to recognize the antigen, as well as various combinations of such portions. Examples of antibody fragments include, but are not limited to, Fv, Fab, Fab′, Fab′-SH, F(ab′)₂, diabodies, tribodies, scFvs, and single-domain antibodies (sdAbs). Diabodies, tribodies, scFvs, and sdAbs are disclosed in detail below.

[0230] The antibodies and, more broadly, the multi-specific antigen-binding polypeptides disclosed herein may comprise one or more amino acid substitutions, insertions and/or deletions in the framework and/or CDR regions of the heavy and light chain variable domains as compared to the corresponding germline sequences. Such mutations can be readily ascertained by comparing the amino acid sequences disclosed herein to germline sequences available from, for example, public antibody sequence databases. The present invention includes antibodies, and antigen-binding fragments thereof, which are derived from any of the amino acid sequences disclosed herein, wherein one or more amino acids within one or more framework and/or CDR regions are mutated to the corresponding residue(s) of the germline sequence from which the antibody was derived, or to the corresponding residue(s) of another human germline sequence, or to a conservative amino acid substitution of the corresponding germline residue(s) (such sequence changes are referred to herein collectively as “germline mutations”). A person of ordinary skill in the art, starting with the heavy and light chain variable region sequences disclosed herein, can easily produce numerous antibodies and antigen-binding fragments which comprise one or more individual germline mutations or combinations thereof. In certain embodiments, all of the framework and/or CDR residues within the V_{H} and/or V_{L} domains are mutated back to the residues found in the original germline sequence from which the antibody was derived. In other embodiments, only certain residues are mutated back to the original germline sequence, e.g., only the mutated residues found within the first 8 amino acids of FR1 or within the last 8 amino acids of FR4, or only the mutated residues found within CDR1, CDR2 or CDR3. In other embodiments, one or more of the framework and/or CDR residue(s) are mutated to the corresponding residue(s) of a different germline sequence (i.e., a germline sequence that is different from the germline sequence from which the antibody was originally derived). Furthermore, the antibodies of the present invention may contain any combination of two or more germline mutations within the framework and/or CDR regions, e.g., wherein certain individual residues are mutated to the corresponding residue of a particular germline sequence while certain other residues that differ from the original germline sequence are maintained or are mutated to the corresponding residue of a different germline sequence. Once obtained, antibodies and antigen-binding fragments that contain one or more germline mutations can be easily tested for one or more desired property such as, improved binding specificity, increased binding affinity, improved or enhanced antagonistic or agonistic biological properties (as the case may be), reduced immunogenicity, etc. Antibodies and antigen-binding fragments obtained in this general manner are encompassed within the present invention.

[0231] The term “monoclonal antibody”, as used herein, refers to an antibody obtained from a population of substantially homogeneous antibodies, i.e., the individual antibodies comprising the population are identical except for possible naturally occurring mutations that may be present in minor amounts. Monoclonal antibodies are highly specific, being directed against a single antigenic epitope. The modifier “monoclonal” indicates the character of the antibody as being obtained from a substantially homogeneous population of antibodies, and is not to be construed as requiring production of the antibody by any particular method. For example, the monoclonal antibodies to be used in accordance with the present invention may be made by the hybridoma method first described by Kohler et al., Nature 256: 495 (1975), and as modified by the somatic hybridization method as set forth above; or may be made by other recombinant DNA methods (see, e.g., U.S. Pat. No. 4,816,567).

[0232] The antigen-binding polypeptides of the present invention may be chimeric, humanized or human. For application in man, it is often desirable to reduce immunogenicity of antigen-binding polypeptides, such as, e.g., antibodies, originally derived from other species, like mouse. This can be done, e.g., by construction of chimeric antibodies, or by a process called “humanization”. In this context, a “chimeric antibody” is understood to be an antibody comprising a domain (e.g. a variable domain) derived from one species (e.g. mouse) fused to a domain (e.g. the constant domains) derived from a different species (e.g. human).

[0233] As used herein, the term “humanized antibody” refers to forms of antibodies that contain sequences from both non-human (e.g., murine) antibodies as well as human antibodies. Such antibodies are chimeric antibodies which contain minimal sequence derived from non-human immunoglobulin. In general, the humanized antibody will comprise substantially all of at least one, and typically two, variable domains, in which all or substantially all of the hypervariable loops correspond to those of a non-human immunoglobulin and all or substantially all of the framework (FR) regions are those of a human immunoglobulin sequence. The humanized antibody optionally also will comprise at least a portion of an immunoglobulin constant region (Fc), typically that of a human immunoglobulin (Jones et al., Nature 321:522-525 (1986); Riechmann et al., Nature 332:323-329 (1988); and Presta, Curr. Op. Struct. Biol 2:593-596 (1992)). Humanization can be essentially performed following the method of Winter and co-workers (Jones et al., Nature 321:522-525 (1986); Riechmann et al., Nature 332:323-3′27 (1988); Verhoeyen et al., Science 239:1534-1536 (1988)), by substituting rodent CDRs or CDR sequences for the corresponding sequences of a human antibody.

[0234] Furthermore, technologies have been developed for creating antibodies based on sequences derived from the human genome, for example by phage display or using transgenic animals (WO 90/05144; D. Marks, H. R. Hoogenboom, T. P. Bonnert, J. McCafferty, A. D. Griffiths and G. Winter (1991) “By-passing immunization. Human antibodies from V-gene libraries displayed on phage.” J. Mol. Biol., 222, 581-597; Knappik et al., J. Mol. Biol. 296: 57-86, 2000; S. Carmen and L. Jermutus, “Concepts in antibody phage display”. Briefings in Functional Genomics and Proteomics 2002 1(2):189-203; Lonberg N, Huszar D. “Human antibodies from transgenic mice”. Int Rev Immunol. 1995; 13(1):65-93; Bruggemann M, Taussig M J. “Production of human antibody repertoires in transgenic mice”. Curr Opin Biotechnol. 1997 August; 8(4):455-8.). Such antibodies are “human antibodies” in the context of the present invention. Specifically, methods for generating human antibodies in genetically modified mice are known (see e.g., U.S. Pat. No. 6,596,541, Regeneron Pharmaceuticals, VELOCIMMUNE®). The VELOCIMMUNE® technology involves generation of a genetically modified mouse having a genome comprising human heavy and light chain variable regions operably linked to endogenous mouse constant region loci such that the mouse produces an antibody comprising a human variable region and a mouse constant region in response to antigenic stimulation. The DNA encoding the variable regions of the heavy and light chains of the antibodies produced from a VELOCIMMUNE® mouse are fully human. Initially, high affinity chimeric antibodies are isolated having a human variable region and a mouse constant region. The antibodies are characterized and selected for desirable characteristics, including affinity, selectivity, epitope, etc. The mouse constant regions are replaced with a desired human constant region to generate a fully human antibody containing a non-IgM isotype, for example, wild type or modified IgG1, IgG2, IgG3, or IgG4. While the constant region selected may vary according to specific use, high affinity antigen-binding and target specificity characteristics reside in the variable region.

[0235] As used herein, “recombinant” antibody means any antibody whose production involves expression of a non-native DNA sequence encoding the desired antibody structure in an organism. In the present invention, recombinant antibodies include tandem scFv (taFv or scFv₂), diabody, dAb₂/VHH₂, knob-into-holes derivates, SEED-IgG, heteroFc-scFv, Fab-scFv, scFv-Jun/Fos, Fab′-Jun/Fos, tribody, DNL-F(ab)₃, scFv₃-CH1/C_{L}, Fab-scFv₂, IgG-scFab, IgG-scFv, scFv-IgG, scFv₂-Fc, F(ab′)₂-scFv₂, scDB-Fc, scDb-CH3, Db-Fc, scFv₂-H/L, DVD-Ig, tandAb, scFv-dhlx-scFv, dAb₂-IgG, dAb-IgG, dAb-Fc-dAb, and combinations thereof.

[0236] The present invention also includes fully human antibodies comprising variants of any of the HCVR, LCVR, and/or CDR amino acid sequences disclosed herein having one or more conservative substitutions. For example, the present invention includes antibodies having HCVR, LCVR, and/or CDR amino acid sequences with, e.g., 10 or fewer, 8 or fewer, 6 or fewer, 4 or fewer, etc. conservative amino acid substitutions relative to any of the HCVR, LCVR, and/or CDR amino acid sequences disclosed herein.

[0237] The term “human antibody”, as used herein, is intended to include antibodies having variable and constant regions derived from human germline immunoglobulin sequences. The human mAbs of the invention may include amino acid residues not encoded by human germline immunoglobulin sequences (e.g., mutations introduced by random or site-specific mutagenesis in vitro or by somatic mutation in vivo), for example in the CDRs and in particular CDR3. However, the term “human antibody”, as used herein, is not intended to include mAbs in which CDR sequences derived from the germline of another mammalian species (e.g., mouse), have been grafted onto human FR sequences.

[0238] Though most naturally occurring antibodies are composed of heavy chains and light chains, camelids (e.g. camels, dromedaries, llamas, and alpacas) and some sharks produce antibodies that consist only of heavy chains. These antibodies bind antigenic epitopes using a single variable domain known as VHH. When produced in Escherichia coli, these molecules are termed single domain antibodies (sdAbs). The simplest application of sdAbs in bispecific antibodies is to link two different sdAbs together to form dAb₂s (VHH₂s). sdAbs can also be applied to IgG-like bispecific antibodies. Examples of this include, but are not limited to, sdAb₂-IgGs, sdAb-IgGs, and sdAb-Fc-dAbs. sdAb₂-IgGs have a similar structure to intact antibodies, but with sdAbs linked to the N-terminal end of the molecule. sdAb-IgGs are intact antibodies specific for one epitope with a single sdAb specific for another epitope linked to the N-termini or C-termini of the heavy chains. Lastly, sdAb-Fc-sdAbs are Fc domains with sdAbs specific for one epitope linked to the N-termini and sdAbs specific for another epitope linked to the C-termini (Chames, P. and Baty, D. In: Bispecific Antibodies. Kontermann R E (ed.), Springer Heidelberg Dordrecht London New York, pp. 101-114 (2011)). Each of the foregoing antibodies is within the scope of the present invention.

[0239] Antigen-binding fragments may include antibody fragments, such as a Fab fragment, a F(ab′)2 fragment, a Fv fragment, a dAb fragment, a fragment containing a CDR, or an isolated CDR. In certain embodiments, the term “antigen-binding fragment” refers to a polypeptide fragment of a multi-specific antigen-binding polypeptide. Antigen-binding fragments of an antigen-binding polypeptide, e.g., an antibody, may be derived, e.g., from full antibody molecules using any suitable standard techniques such as proteolytic digestion or recombinant genetic engineering techniques involving the manipulation and expression of DNA encoding antibody variable and (optionally) constant domains. Such DNA is known and/or is readily available from, e.g., commercial sources, DNA libraries (including, e.g., phage-antibody libraries), or can be synthesized. The DNA may be sequenced and manipulated chemically or by using molecular biology techniques, for example, to arrange one or more variable and/or constant domains into a suitable configuration, or to introduce codons, create cysteine residues, modify, add or delete amino acids, etc.

[0240] Non-limiting examples of antigen-binding fragments include: (i) Fab fragments; (ii) F(ab′)2 fragments; (iii) Fd fragments; (iv) Fv fragments; (v) single-chain Fv (scFv) molecules; (vi) dAb fragments; and (vii) minimal recognition units consisting of the amino acid residues that mimic the hypervariable region of an antibody (e.g., an isolated complementarity determining region (CDR) such as a CDR3 peptide), or a constrained FR3-CDR3-FR4 peptide. Other engineered molecules, such as domain-specific antibodies, single domain antibodies, domain-deleted antibodies, chimeric antibodies, CDR-grafted antibodies, diabodies, triabodies, tetrabodies, minibodies, nanobodies (e.g. monovalent nanobodies, bivalent nanobodies, etc.), small modular immunopharmaceuticals (SMIPs), and shark variable IgNAR domains, are also encompassed within the expression “antigen-binding fragment,” as used herein.

[0241] An antigen-binding fragment of an antibody will typically comprise at least one variable domain. The variable domain may be of any size or amino acid composition and will generally comprise at least one CDR, which is adjacent to or in frame with one or more framework sequences. In antigen-binding fragments having a VH domain associated with a VL domain, the VH and VL domains may be situated relative to one another in any suitable arrangement. For example, the variable region may be dimeric and contain VH-VH, VH-VL or VL-VL dimers. Alternatively, the antigen-binding fragment of an antibody may contain a monomeric VH or VL domain.

[0242] In certain embodiments, an antigen-binding fragment of an antibody may contain at least one variable domain covalently linked to at least one constant domain. Non-limiting, exemplary configurations of variable and constant domains that may be found within an antigen-binding fragment of an antibody of the present invention include: (i) VH —CH1; (ii) VH —CH2; (iii) VH —CH3; (iv) VH —CH1-CH2; (v) VH —CH1-CH2-CH3; (vi) VH —CH2-CH3; (vii) VH —CL; (viii) VL —CH1; (ix) VL —CH2; (x) VL —CH3; (xi) VL —CH1-CH2; (xii) VL —CH1-CH2-CH3; (xiii) VL —CH2-CH3; and (xiv) VL —CL. In any configuration of variable and constant domains, including any of the exemplary configurations listed above, the variable and constant domains may be either directly linked to one another or may be linked by a full or partial hinge or linker region. A hinge region may consist of at least 2 (e.g., 5, 10, 15, 20, 40, 60 or more) amino acids, which result in a flexible or semi-flexible linkage between adjacent variable and/or constant domains in a single polypeptide molecule. Moreover, an antigen-binding fragment of an antibody of the present invention may comprise a homo-dimer or hetero-dimer (or other multimer) of any of the variable and constant domain configurations listed above in non-covalent association with one another and/or with one or more monomeric VH or VL domain (e.g., by disulfide bond(s)).

[0243] As with full antibody molecules, antigen-binding fragments may be mono-specific or multi-specific (e.g., bi-specific). A multi-specific antigen-binding fragment of an antigen-binding polypeptide, e.g., an antibody, will typically comprise at least two different variable domains, wherein each variable domain is capable of specifically binding to a separate antigen or to a different epitope on the same antigen. Any multi-specific antigen-binding polypeptide format, including the exemplary bi-specific antibody formats disclosed herein, may be adapted for use in the context of an antigen-binding fragment of an antibody of the present invention using routine techniques available in the art.

[0244] In specific embodiments, antigen-binding polypeptides or fragments thereof, e.g., an antibody or antibody fragments of the invention, may be conjugated to a moiety such as a ligand or a therapeutic moiety (“immunoconjugate”), such as an antibiotic, a second antibody, or an antibody to another antigen such as a tumor-specific antigen, an autoimmune tissue antigen, a virally-infected cell antigen, a Fc receptor, a T-cell receptor, or a T-cell co-inhibitor, or an immunotoxin, or any other therapeutic moiety useful for treating a disease or condition including cancer, autoimmune disease, or chronic viral infection.

[0245] An “isolated antigen-binding polypeptide,” e.g., an “isolated antibody”, as used herein, is intended to refer to an antigen-binding polypeptide, such as an antibody that is substantially free of other antigen-binding polypeptides, e.g., antibodies (Abs), having different antigenic specificities (e.g., an isolated antibody that specifically binds the cell-specific or target antigens of the present invention, or a fragment thereof, is substantially free of Abs that specifically bind antigens other than the cell-specific or target antigens of the present invention).

[0246] A “blocking antibody” or a “neutralizing antibody”, as used herein (or an “antibody that neutralizes activity of the cell-specific or target antigens of the present invention” or “antagonist antibody”), is intended to refer to an antibody whose binding to the cell-specific or target antigens of the present invention results in inhibition of at least one biological activity of the cell-specific or target antigens of the present invention.

[0247] An “activating antibody” or an “enhancing antibody”, as used herein (or an “agonist antibody”), is intended to refer to an antibody whose binding to the cell-specific or target antigens of the present invention results in increasing or stimulating at least one biological activity of the cell-specific or target antigens of the present invention.

[0248] Preferably, the light chains for the multi-specific antigen-binding polypeptides of the invention, such as, e.g., bi-specific or other multi-specific polypeptides are the so-called universal light chains (“ULCs”) as disclosed in, e.g., U.S. patent application Ser. Nos. 13/832,247 and 14/030,424. A common light chain for a plurality of heavy chains has a practical utility. In various embodiments, antigen-binding polypeptides, e.g., antibodies, that are expressed in a mouse that can only express a common light chain will have heavy chains that can associate and express with an identical or substantially identical light chain. This is particularly useful in making multi-specific antigen-binding polypeptides, such as, e.g., bispecific antibodies. The compositions and methods described herein utilize polypeptides that bind more than one epitope with high affinity, e.g., bispecific antibodies. Advantages of this methodology include the ability to select suitably high binding (e.g., affinity matured) heavy chain immunoglobulin chains each of which will associate with a single light chain.

[0249] Several techniques for making bispecific antibody fragments from recombinant cell culture have been reported. However, synthesis and expression of bispecific binding polypeptides has been problematic, in part due to issues associated with identifying a suitable light chain that can associate and express with two different heavy chains, and in part due to isolation issues. The ULCs as disclosed in U.S. patent application Ser. Nos. 13/832,247 and 14/030,424 originate from a mouse genetically modified to select, through otherwise natural processes, a suitable light chain that can associate and express with more than one heavy chain, including heavy chains that are somatically mutated (e.g., affinity matured). Human V_{L} and V_{H} sequences from suitable B cells of immunized mice that express affinity matured antibodies having reverse chimeric heavy chains (i.e., human variable and mouse constant) can be identified and cloned in frame in an expression vector with a suitable human constant region gene sequence (e.g., a human IgG1). Two such constructs can be prepared, wherein each construct encodes a human heavy chain variable domain that binds a different epitope. One of the human V_{L}s (e.g., human VK1-39JK5 or human VK3-20JK1), in germline sequence or from a B cell wherein the sequence has been somatically mutated, can be fused in frame to a suitable human constant region gene (e.g., a human K constant gene). These three fully human heavy and light constructs can be placed in a suitable cell for expression. The cell will express two major species: a homodimeric heavy chain with the identical light chain, and a heterodimeric heavy chain with the identical light chain. To allow for a facile separation of these major species, one of the heavy chains is modified to omit a Protein A-binding determinant, resulting in a differential affinity of a homodimeric binding polypeptide from a heterodimeric binding polypeptide. Compositions and methods that address this issue are described in U.S. patent application Ser. No. 12/832,838, filed 25 Jun. 2010, entitled “Readily Isolated Bispecific Antibodies with Native Immunoglobulin Format,” published as US 2010/10331527 A1, hereby incorporated by reference.

[0250] One method for making an epitope-binding polypeptide that binds more than one epitope is to immunize a first mouse with an antigen that comprises a first epitope of interest, wherein the mouse comprises an endogenous immunoglobulin light chain variable region locus that does not contain an endogenous mouse V_{L} that is capable of rearranging and forming a light chain, wherein at the endogenous mouse immunoglobulin light chain variable region locus is a single rearranged human V_{L} region operably linked to the mouse endogenous light chain constant region gene, and the rearranged human V_{L} region is selected from a human VK1-39JK5 and a human VK3-20JK1, and the endogenous mouse V_{H} gene segments have been replaced in whole or in part with human V_{H} gene segments, such that immunoglobulin heavy chains made by the mouse are solely or substantially heavy chains that comprise human variable domains and mouse constant domains. When immunized, such a mouse will make a reverse chimeric antibody, comprising only one of two human light chain variable domains (e.g., one of human VK1-39JK5 or human VK3-20JK1). Once a B cell is identified that encodes a V_{H} that binds the epitope of interest, the nucleotide sequence of the V_{H} (and, optionally, the V_{L}) can be retrieved (e.g., by PCR) and cloned into an expression construct in frame with a suitable human immunoglobulin constant domain. This process can be repeated to identify a second V_{H} domain that binds a second epitope, and a second V_{H} gene sequence can be retrieved and cloned into an expression vector in frame to a second suitable immunoglobulin constant domain. The first and the second immunoglobulin constant domains can be of the same or different isotype, and one of the immunoglobulin constant domains (but not the other) can be modified as described herein or in US 2010/0331527 A1, and epitope-binding polypeptide can be expressed in a suitable cell and isolated based on its differential affinity for Protein A as compared to a homodimeric epitope-binding polypeptide, e.g., as described in US 2010/0331527 A1.

[0251] Thus, a method for making a bispecific epitope-binding polypeptide comprises identifying a first affinity-matured (e.g., comprising one or more somatic hypermutations) human V_{H} nucleotide sequence (V_{H}1) from a mouse, identifying a second affinity-matured (e.g., comprising one or more somatic hypermutations) human V_{H} nucleotide sequence (V_{H}2) from a mouse as described herein, cloning V_{H}1 in frame with a human heavy chain lacking a Protein A-determinant modification as disclosed, e.g., in US 2010/10331527 A1 for forming heavy chain 1 (HCl), cloning V_{H}2 in frame with a human heavy chain comprising a Protein A-determinant as disclosed, e.g., in US 2010/10331527 A1 to form heavy chain 2 (HC2), introducing an expression vector comprising HCl and the same or a different expression vector comprising HC2 into a cell, wherein the cell also expresses a human immunoglobulin light chain that comprises a human VK1-39/human JK5 or a human VK3-20/human JK1 fused to a human light chain constant domain, allowing the cell to express a bispecific epitope binding polypeptide comprising a V_{H} domain encoded by V_{H}1 and a V_{H} domain encoded by V_{H}2, and isolating the bispecific epitope-binding polypeptide based on its differential ability to bind Protein A as compared with a mono-specific homodimeric epitope-binding polypeptide. In an exemplary embodiment, HCl may be an IgG1, and HC2 may be an IgG1 that comprises the modification H95R (IMGT; H435R by EU) and further comprises the modification Y96F (IMGT; Y436F by EU). In another exemplary embodiment, the V_{H} domain encoded by V_{H}1, the V_{H} domain encoded by V_{H}2, or both, may be somatically mutated.

[0252] To express human V_{H} genes that express with a universal human V_{L}, a variety of human variable regions from affinity matured antibodies raised against four different antigens may be expressed with either their cognate light chain, or at least one of a human light chain selected from human VK1-39/JK5, human VK3-20/JK1, or human VpreB/JK5. For antibodies to each of the antigens, somatically mutated high affinity heavy chains from different gene families may be paired successfully with rearranged human germline 39JK5 and VK3-20JKI regions and may be secreted from cells expressing the heavy and light chains. For VK1-39JK5 and VK3-20JKI, V_{H} domains derived from the following human V_{H} gene families may be expressed favorably: 1-2, 1-8, 1-24, 2-5, 3-7, 3-9, 3-11, 3-13, 3-15, 3-20, 3-23, 3-30, 3-33, 3-48, 4-31, 4-39, 4-59, 5-51, and 6-1. Thus, a mouse that is engineered to express a limited repertoire of human V_{L} domains from one or both of VK1-39JK5 and VK3-20JKI will generate a diverse population of somatically mutated human V_{H} domains from a V_{H} locus modified to replace mouse V_{H} gene segments with human V_{H} gene segments.

[0253] Mice genetically engineered to express reverse chimeric (human variable, mouse constant) immunoglobulin heavy chains associated with a single rearranged light chain (e.g., a VK1-39/J or a VK3-20/J), when immunized with an antigen of interest, may generate B cells that comprise a diversity of human V_{H} rearrangements and express a diversity of high-affinity antigen-specific antibodies with diverse properties with respect to their ability to block binding of the antigen to its ligand, and with respect to their ability to bind variants of the antigen.

[0254] Thus, the mice and methods described herein are useful in making and selecting human immunoglobulin heavy chain variable domains, including somatically mutated human heavy chain variable domains, that result from a diversity of rearrangements, that exhibit a wide variety of affinities (including exhibiting a K_{D} of about a nanomolar or less), a wide variety of specificities (including binding to different epitopes of the same antigen), and that associate and express with the same or substantially the same human immunoglobulin light chain variable region.

[0255] To generate fully human multi-specific antigen-binding polypeptide, such as, e.g., bispecific antibodies having a common light chain, as a first step in various embodiments, the first and second nucleic acid sequences that each encode human heavy chain variable domains (and any additional nucleic acid sequences forming the bispecific antibody) are selected from parent monoclonal antibodies having desired characteristics such as, for example, the ability to bind different epitopes, different affinities, etc. Normally, the nucleic acid sequences encoding the human heavy chain variable domains are isolated from immunized mice to allow for fusing with human heavy chain constant regions to be suitable for human administration. Further modifications to the sequence(s) can be made by introducing mutations that add additional functionality to the bispecific antibody, which include, for example, increasing serum half-life (e.g., see U.S. Pat. No. 7,217,797) and/or increasing antibody-dependent cell-mediated cytotoxicity (e.g., see U.S. Pat. No. 6,737,056). Introducing mutations into the constant regions of antibodies is known in the art. Additionally, part of the bispecific antibody can be made recombinantly in cell culture and other part(s) of the molecule can be made by those techniques mentioned above.

[0256] Several techniques for producing antigen-binding polypeptides, such as, e.g., antibodies, have been described. For example, in various embodiments chimeric antibodies are produced in mice as described herein. Antibodies can be isolated directly from B cells of an immunized mouse (e.g., see US 2007/0280945 A1) and/or the B cells of the immunized mouse can be used to make hybridomas (Kohler and Milstein, 1975, Nature 256:495-497). DNA encoding the antibodies (human heavy and/or light chains) from mice is readily isolated and sequenced using conventional techniques. Hybridoma and/or B cells derived from mice serve as a preferred source of such DNA. Once isolated, the DNA may be placed into expression vectors, which are then transfected into host cells that do not otherwise produce immunoglobulin polypeptide, to obtain the synthesis of monoclonal antibodies in the recombinant host cells. The DNA also may be modified, for example, by substituting the coding sequence for human heavy and light chain constant domains in place of the murine sequences.

[0257] In various embodiments, following isolation of the DNA and selection of the first and second nucleic acid sequences that encode the first and second human heavy chain variable domains having the desired specificities/affinities, and a third nucleic acid sequence that encodes a human light chain domain (a germline rearranged sequence or a light chain sequence isolated from a mouse as described herein), the three nucleic acid sequences encoding the molecules are expressed to form a bispecific antibody using recombinant techniques which are widely available in the art. Often, the expression system of choice will involve a mammalian cell expression vector and host so that the bispecific antibody is appropriately glycosylated (e.g., in the case of bispecific antibodies comprising antibody domains which are glycosylated). However, the molecules can also be produced in the prokaryotic expression systems. Normally, the host cell will be transformed with DNA encoding both the first human heavy chain variable domain, the second human heavy chain variable domain, the human light chain domain on a single vector or independent vectors. However, it is possible to express the first human heavy chain variable domain, second human heavy chain variable domain, and human light chain domain (the bispecific antibody components) in independent expression systems and couple the expressed polypeptides in vitro. In various embodiments, the human light chain domain comprises a germline sequence. In various embodiments, the human light chain domain comprises no more than one, no more than two, no more than three, no more than four, or no more than five somatic hypermutations with the light chain variable sequence of the light chain domain.

[0258] In various embodiments, the nucleic acid(s) (e.g., cDNA or genomic DNA) encoding the two heavy chains and single human light chain are inserted into a replicable vector for further cloning (amplification of the DNA) and/or for expression. Many vectors are available, and generally include, but are not limited to, one or more of the following: a signal sequence, an origin of replication, one or more marker genes, an enhancer element, a promoter, and a transcription termination sequence. Each component may be selected individually or based on a host cell choice or other criteria determined experimentally. Several examples of each component are known in the art.

[0259] Expression and cloning vectors usually contain a promoter that is recognized by the host organism and is operably linked to the nucleic acid sequences that encode each or all the components of the bispecific antibody. A large number of promoters recognized by a variety of potential host cells are well known. These promoters are operably linked to bispecific antibody-encoding DNA by removing the promoter from the source DNA by restriction enzyme digestion and inserting the isolated promoter sequence into the vector. Expression vectors used in eukaryotic host cells (yeast, fungi, insect, plant, animal, human, or nucleated cells from other multicellular organisms) may also contain sequences necessary for the termination of transcription and for stabilizing the mRNA. Such sequences are commonly available from the 5′ and, occasionally 3′, untranslated regions of eukaryotic or viral DNAs or cDNAs. These regions contain nucleotide segments transcribed as polyadenylated fragments in the untranslated portion of the mRNA encoding the bispecific antibody components. Suitable expression vectors for various embodiments include those that provide for the transient expression in mammalian cells of DNA encoding the bispecific antibody. In general, transient expression involves the use of an expression vector that is able to replicate efficiently in a host cell, such that the host cell accumulates many copies of the expression vector and, in turn, synthesizes high levels of a desired polypeptide encoded by the expression vector. Transient expression systems, comprising a suitable expression vector and a host cell, allow for the convenient positive identification of polypeptides encoded by cloned DNAs, as well as for the rapid screening of bispecific antibodies having desired binding specificities/affinities or the desired gel migration characteristics relative to the parental antibodies having homodimers of the first or second human heavy chain variable domains. In various embodiments, once the DNA encoding the components of the bispecific antibody are assembled into the desired vector(s) as described above, they are introduced into a suitable host cell for expression and recovery. Transfecting host cells can be accomplished using standard techniques known in the art appropriate to the host cell selected (e.g., electroporation, nuclear microinjection, bacterial protoplast fusion with intact cells, or polycations, e.g., polybrene, polyornithine, etc.).

[0260] A host cell is chosen, in various embodiments, that best suits the expression vector containing the components and allows for the most efficient and favorable production of the bispecific antibody species. Exemplary host cells for expression include those of prokaryotes and eukaryotes (single-cell or multiple-cell), bacterial cells (e.g., strains of E. coli, Bacillus spp., Streptomyces spp., etc.), mycobacteria cells, fungal cells, yeast cells (e.g., S. cerevisiae, S. pombe, P. pastoris, P. methanolica, etc.), plant cells, insect cells (e.g., SF-9, SF-21, baculovirus-infected insect cells, Trichoplusia ni, etc.), non-human animal cells, human cells, or cell fusions such as, for example, hybridomas or quadromas. In various embodiments, the cell is a human, monkey, ape, hamster, rat, or mouse cell. In various embodiments, the cell is a eukaryotic cell selected from CHO (e.g., CHO K1, DXB-11 CHO, Veggie-CHO), COS (e.g., COS-7), retinal cell, Vero, CV1, kidney (e.g., HEK293, 293 EBNA, MSR293, MDCK, HaK, BHK), HeLa, HepG2, WI38, MRC 5, Col0205, HB 8065, HL-60, (e.g., BHK21), Jurkat, Daudi, A431 (epidermal), CV-1, U937, 3T3, L cell, C127 cell, SP2/0, NS-0, MMT 060562, Sertoli cell, BRL 3A cell, HT1080 cell, myeloma cell, tumor cell, and a cell line derived from an aforementioned cell. In various embodiments, the cell comprises one or more viral genes, e.g. a retinal cell that expresses a viral gene (e.g., aPER.C6™ cell).

[0261] Mammalian host cells used to produce a multi-specific antigen-binding polypeptide, such as, e.g., a bispecific antibody, may be cultured in a variety of media. Commercially available media such as Ham's F10 (Sigma), Minimal Essential Medium ((MEM), Sigma), RPMI-1640 (Sigma), and Dulbecco's Modified Eagle's Medium ((DMEM), Sigma) are suitable for culturing the host cells. Media may be supplemented as necessary with hormones and/or other growth factors (such as insulin, transferrin, or epidermal growth factor), salts (such as sodium chloride, calcium, magnesium, and phosphate), buffers (such as HEPES), nucleosides (such as adenosine and thymidine), antibiotics (such as GENTAMYCIN), trace elements (defined as inorganic compounds usually present at final concentrations in the micromolar range), and glucose or an equivalent energy source. Any other supplements may also be included at appropriate concentrations as known to those skilled in the art. The culture conditions, such as temperature, pH, and the like, are, in various embodiments, those previously used with the host cell selected for expression, and will be apparent to those skilled in the art. The multi-specific antigen-binding polypeptide, e.g., bispecific antibody, is in various embodiments recovered from the culture medium as a secreted polypeptide, although it also may be recovered from host cell lysate when directly produced without a secretory signal. If the multi-specific antigen-binding polypeptide, e.g., bispecific antibody, is membrane-bound, it can be released from the membrane using a suitable detergent solution (e.g., Triton-X 100). Preferably, the multi-specific antigen-binding polypeptide, e.g., bispecific antibody, described herein involves the use of a first immunoglobulin C_{H}3 domain and a second immunoglobulin C_{H}3 domain, wherein the first and second immunoglobulin C_{H}3 domains differ from one another by at least one amino acid, and wherein at least one amino acid difference reduces binding of the bispecific antibody to Protein A as compared to a bispecific antibody lacking the amino acid difference (see US 2010/0331527 A1; herein incorporated by reference). In one embodiment, the first immunoglobulin C_{H}3 domain binds Protein A and the second immunoglobulin C_{H}3 domain contains a mutation that reduces or abolishes Protein A binding such as an H95R modification as disclosed herein. The second C_{H}3 may further comprise a Y96F modification as set forth above. Further modifications that may be found within the second C_{H}3 include: D16E, L18M, N44S, K52N, V57M, and V82I (by IMGT; D356E, L358M, N384S, K392N, V397M, and V422I by EU) in the case of IgG1 antibodies; N44S, KS2N, and V82I (IMGT; N384S, K392N, and V422I by EU) in the case of IgG2 antibodies; and QI5R, N44S, K52N, V57M, R69K, E79Q, and V82I (by IMGT; Q355R, N384S, K392N, V397M, R409K, E419Q, and V422I by EU) in the case of IgG4 antibodies. Variations on the bispecific antibody format described above are contemplated within the scope of the present invention.

[0262] Because of the dual nature of multi-specific antigen-binding polypeptides, e.g., bispecific antibodies (i.e., may be specific for different epitopes of one polypeptide or may contain antigen-binding domains specific for more than one target polypeptide, see, e.g., Tutt et aI., 1991, J. Immunol. 147:60-69; Kufer et aI., 2004, Trends Biotechnol. 22:238-244), they offer many useful advantages for therapeutic application. For example, multi-specific antigen-binding polypeptides, e.g., the bispecific antibodies, can be used for redirected cytotoxicity (e.g., to kill tumor cells), as a vaccine adjuvant, for delivering thrombolytic agents to clots, for converting enzyme activated prodrugs at a target site (e.g., a tumor), for treating infectious diseases, targeting immune complexes to cell surface receptors, or for delivering immunotoxins to tumor cells.

[0263] Other exemplary multi-specific antigen-binding polypeptides, e.g., bispecific antibody formats, that can be used in the context of the present invention include, without limitation, e.g., scFv-based or diabody bispecific formats, IgG-scFv fusions, dual variable domain (DVD)-Ig, Quadroma, knobs-into-holes, common light chain (e.g., common light chain with knobs-into-holes, etc.), CrossMab, CrossFab, (SEED)body, leucine zipper, Duobody, IgG1/IgG2, dual acting Fab (DAF)-IgG, and Mab2 bispecific formats (see, e.g., Klein et al. 2012, mAbs 4:6, 1-11, and references cited therein, for a review of the foregoing formats). Multi-specific antigen-binding polypeptides, e.g., bispecific antibodies, can also be constructed using peptide/nucleic acid conjugation, e.g., wherein unnatural amino acids with orthogonal chemical reactivity are used to generate site-specific antibody-oligonucleotide conjugates which then self-assemble into multimeric complexes with defined composition, valency and geometry. (See, e.g., Kazane et al., J. Am. Chem. Soc. [Epub: Dec. 4, 2012]).

[0264] The multi-specific antigen-binding polypeptides, e.g., bispecific antibodies, described herein can also be used in several therapeutic and non-therapeutic and/or diagnostic assay methods, such as, enzyme immunoassays, two-site immunoassays, in vitro or in vivo immunodiagnosis of various diseases (e.g., cancer), competitive binding assays, direct and indirect sandwich assays, and immunoprecipitation assays. Other uses for the multi-specific antigen-binding polypeptides, e.g., bispecific antibodies, will be apparent to those skilled in the art.

[0265] The antigen-binding polypeptides and fragments thereof, including antibodies and antibody fragments, of the present invention encompass polypeptides having amino acid sequences that vary from those of the described antibodies, but that retain the ability to bind the cell-specific and target antigens of the present invention. Such variant polypeptides and polypeptide fragments, including antibodies and antibody fragments, comprise one or more additions, deletions, or substitutions of amino acids when compared to parent sequence, but exhibit biological activity that is essentially equivalent to that of the parent molecule. Likewise, the antigen-binding polypeptides, including antibody-encoding DNA sequences of the present invention, encompass sequences that comprise one or more additions, deletions, or substitutions of nucleotides when compared to the disclosed sequence, but that encode an antigen-binding polypeptide or fragment thereof, including an antibody or antibody fragment, that is essentially bioequivalent to an antibody or antibody fragment of the invention.

[0266] Two antigen-binding polypeptides, or antibodies, are considered bioequivalent if, for example, they are pharmaceutical equivalents or pharmaceutical alternatives whose rate and extent of absorption do not show a significant difference when administered at the same molar dose under similar experimental conditions, either single dose or multiple doses. Some antigen-binding polypeptides or antibodies will be considered equivalents or pharmaceutical alternatives if they are equivalent in the extent of their absorption but not in their rate of absorption and yet may be considered bioequivalent because such differences in the rate of absorption are intentional and are reflected in the labeling, are not essential to the attainment of effective body drug concentrations on, e.g., chronic use, and are considered medically insignificant for the particular drug product studied.

[0267] In one embodiment, two antigen-binding polypeptides are bioequivalent if there are no clinically meaningful differences in their safety, purity, or potency.

[0268] In another embodiment, two antigen-binding polypeptides are bioequivalent if a patient can be switched one or more times between the reference product and the biological product without an expected increase in the risk of adverse effects, including a clinically significant change in immunogenicity, or diminished effectiveness, as compared to continued therapy without such switching.

[0269] In a further embodiment, two antigen-binding polypeptides are bioequivalent if they both act by a common mechanism or mechanisms of action for the condition or conditions of use, to the extent that such mechanisms are known.

[0270] Bioequivalence may be demonstrated by in vivo and/or in vitro methods. Bioequivalence measures include, e.g., (a) an in vivo test in humans or other mammals, in which the concentration of the antibody or its metabolites is measured in blood, plasma, serum, or other biological fluid as a function of time; (b) an in vitro test that has been correlated with and is reasonably predictive of human in vivo bioavailability data; (c) an in vivo test in humans or other mammals in which the appropriate acute pharmacological effect of the antibody (or its target) is measured as a function of time; and (d) in a well-controlled clinical trial that establishes safety, efficacy, or bioavailability or bioequivalence of an antibody.

[0271] Bioequivalent variants of the antigen-binding polypeptides, including the antibodies of the invention, may be constructed by, for example, making various substitutions of residues or sequences or deleting terminal or internal residues or sequences not needed for biological activity. For example, cysteine residues not essential for biological activity can be deleted or replaced with other amino acids to prevent formation of unnecessary or incorrect intramolecular disulfide bridges upon renaturation. In other contexts, bioequivalent antigen-binding polypeptides, including antibodies, may include antigen-binding polypeptides, including antibody variants, comprising amino acid changes, which modify the glycosylation characteristics of the antigen-binding polypeptide, e.g., antibodies, e.g., mutations that eliminate or remove glycosylation.

[0272] In some embodiments, Fc-containing polypeptides can comprise modifications in immunoglobulin domains, including where the modifications affect one or more effector functions of the binding polypeptide (e.g., modifications that affect FcγR binding, FcRn binding and thus half-life, and/or CDC activity). Such modifications include, but are not limited to, the following modifications and combinations thereof, with reference to EU numbering of an immunoglobulin constant region: 238, 239, 248, 249, 250, 252, 254, 255, 256, 258, 265, 267, 268, 269, 270, 272, 276, 278, 280, 283, 285, 286, 289, 290, 292, 293, 294, 295, 296, 297, 298, 301, 303, 305, 307, 308, 309, 311, 312, 315, 318, 320, 322, 324, 326, 327, 328, 329, 330, 331, 332, 333, 334, 335, 337, 338, 339, 340, 342, 344, 356, 358, 359, 360, 361, 362, 373, 375, 376, 378, 380, 382, 383, 384, 386, 388, 389, 398, 414, 416, 419, 428, 430, 433, 434, 435, 437, 438, and 439.

[0273] In one embodiment, the heavy chain constant region sequence comprises a modification in a C_{H}2 or a C_{H}3 region, wherein the modification increases affinity of the heavy chain constant region amino acid sequence to FcRn in an acidic environment (e.g., in an endosome where pH ranges from about 5.5 to about 6.0).

[0274] In another embodiment, the heavy chain constant region nucleotide sequence encodes a human heavy chain constant region amino acid sequence comprising a modification at position 250 (e.g., E or Q); 250 and 428 (e.g., L or F); 252 (e.g., L/Y/F/W or T); 254 (e.g., S or T); and 256 (e.g., S/R/Q/E/D or T); or a modification at position 428 and/or 433 (e.g., L/R/S/P/Q or K) and/or 434 (e.g., H/F or Y); or a modification at position 250 and/or 428; or a modification at position 307 or 308 (e.g., 308F, V308F), and 434. In a further embodiment, the modification comprises a 428L (e.g., M428L) and 434S (e.g., N434S) modification; a 428L, 259I (e.g., V259I), and 308F (e.g., V308F) modification; a 433K (e.g., H433K) and a 434 (e.g., 434Y) modification; a 252, 254, and 256 (e.g., 252Y, 254T, and 256E) modification; a 250Q and 428L modification (e.g., T250Q and M428L); and a 307 and/or 308 modification (e.g., 308F or 308P).

[0275] In another embodiment, the heavy chain constant region nucleotide sequence encodes a human C_{H}2 amino acid sequence comprising at least one modification between amino acid residues at positions 252 and 257, wherein the modification increases affinity of the human C_{H}2 amino acid sequence to FcRn in an acidic environment (e.g., in an endosome where pH ranges from about 5.5 to about 6.0).

[0276] In another embodiment, the heavy chain constant region nucleotide sequence encodes a human C_{H}2 amino acid sequence comprising at least one modification between amino acid residues at positions 307 and 311, wherein the modification increases affinity of the C_{H}2 amino acid sequence to FcRn in an acidic environment (e.g., in an endosome where pH ranges from about 5.5 to about 6.0).

[0277] In another embodiment, the heavy chain constant region nucleotide sequence encodes a human C_{H}3 amino acid sequence, wherein the C_{H}3 amino acid sequence comprises at least one modification between amino acid residues at positions 433 and 436, wherein the modification increases affinity of the C_{H}3 amino acid sequence to FcRn in an acidic environment (e.g., in an endosome where pH ranges from about 5.5 to about 6.0).

[0278] In another embodiment, the heavy chain constant region nucleotide sequence encodes a human heavy chain constant region amino acid sequence comprising a mutation selected from the group consisting of M428L, N434S, and a combination thereof.

[0279] In another embodiment, the heavy chain constant region nucleotide sequence encodes a human heavy chain constant region amino acid sequence comprising a mutation selected from the group consisting of M428L, V259I, V308F, and a combination thereof.

[0280] In another embodiment, the heavy chain constant region nucleotide sequence encodes a human heavy chain constant region amino acid sequence comprising an N434A mutation.

[0281] In another embodiment, the heavy chain constant region nucleotide sequence encodes a human heavy chain constant region amino acid sequence comprising a mutation selected from the group consisting of M252Y, S254T, T256E, and a combination thereof.

[0282] In another embodiment, the heavy chain constant region nucleotide sequence encodes a human heavy chain constant region amino acid sequence comprising a mutation selected from the group consisting of T250Q, M248L, or a combination thereof.

[0283] In another embodiment, the heavy chain constant region nucleotide sequence encodes a human heavy chain constant region amino acid sequence comprising a mutation selected from the group consisting of H433K, N434Y, or a combination thereof.

[0284] In another embodiment, the heavy chain constant region nucleotide sequence encodes a human heavy chain constant region amino acid sequence comprising a mutation selected from the group consisting of H433K, N434F, or a combination thereof.

[0285] In general, the antigen-binding polypeptides, including the antibodies of the present invention, function by binding to cell-specific or target antigens. The present invention includes antibodies to cell-specific or target antigens and antigen-binding fragments thereof that bind soluble monomeric, dimeric, or multimeric cell-specific or target antigen molecules with high affinity. The terms “antigen-binding fragment” of an antibody, or “antibody fragment”, as used herein, refers to one or more fragments of an antibody that retain the ability to bind to the cell-specific or target antigens of the present invention. For example, the present invention includes antigen-binding polypeptides, including the antibodies and antigen-binding fragments of antibodies that bind monomeric cell-specific or target antigens of the present invention (e.g., at 25° C. or at 37° C.) with a K_{D} of less than about 50 nM as measured by surface plasmon resonance. In certain embodiments, the antigen-binding polypeptides, including the antibodies or antigen-binding fragments thereof bind monomeric cell-specific or target antigens of the present invention with a K_{D} of less than about 40 nM, less than about 30 nM, less than about 20 nM, less than about 10 nM less than about 5 nM, less than about 2 nM or less than about 1 nM, as measured by surface plasmon resonance or a substantially similar assay.

[0286] The present invention also includes antigen-binding polypeptides and fragments thereof, such as, e.g., antibodies and antigen-binding fragments thereof that bind dimeric cell-specific or target antigens (e.g., at 25° C. or at 37° C.) with a K_{D} of less than about 400 pM as measured by surface plasmon resonance. In certain embodiments, the antigen-binding polypeptides and fragments thereof, such as, e.g., antibodies or antigen-binding fragments thereof, bind dimeric cell-specific or target antigens with a K_{D} of less than about 300 pM, less than about 250 pM, less than about 200 pM, less than about 100 pM, or less than about 50 pM, as measured by surface plasmon resonance or a substantially similar assay.

[0287] The present invention also includes antigen-binding polypeptides and fragments thereof, such as, e.g., antibodies and antigen-binding fragments thereof that bind the cell-specific or target antigens with a dissociative half-life (t½) of greater than about 1.1 minutes as measured by surface plasmon resonance at 25° C. or 37° C., or a substantially similar assay. In certain embodiments, the antigen-binding polypeptides and fragments thereof, such as, e.g., antibodies or antigen-binding fragments of the present invention bind CD3 with a t_{1/2} of greater than about 5 minutes, greater than about 10 minutes, greater than about 30 minutes, greater than about 50 minutes, greater than about 60 minutes, greater than about 70 minutes, greater than about 80 minutes, greater than about 90 minutes, greater than about 100 minutes, greater than about 200 minutes, greater than about 300 minutes, greater than about 400 minutes, greater than about 500 minutes, greater than about 600 minutes, greater than about 700 minutes, greater than about 800 minutes, greater than about 900 minutes, greater than about 1000 minutes, or greater than about 1200 minutes, as measured by surface plasmon resonance at 25° C. or 37° C. or a substantially similar assay.

[0288] In some embodiments, the antigen-binding polypeptides, e.g., the antibodies, of the present invention may bind to the extracellular domain of a cell-specific or target antigen of the present invention or to a particular region of the domain. In some embodiments, the antigen-binding polypeptides, such as, e.g., the antibodies, of the present invention may bind to more than one domain (cross-reactive antibodies).

[0289] In certain embodiments, the antigen-binding polypeptides, e.g., the antibodies, of the present invention may function by blocking or inhibiting the activity of the target antigen. For example, the antigen-binding polypeptides may prevent the subunits of a dimeric target antigen from forming a complex, which complex is necessary for activation. See, e.g., FIG. 4B. In certain other embodiments, the antigen-binding polypeptides, e.g., the antibodies, may function by activating the target antigen. For example, the antigen-binding polypeptides may bring the subunits of a dimeric target antigen together allowing them to form a complex, which complex is necessary for activation. See, e.g., FIGS. 1B and 1C.

[0290] The antigen-binding polypeptides, e.g., antibodies, of the present invention may possess one or more of the aforementioned biological characteristics, or any combinations thereof. Other biological characteristics of the antigen-binding polypeptides, e.g., antibodies, of the present invention will be evident to a person of ordinary skill in the art from a review of the present disclosure including the working Examples herein.

[0291] The present invention encompasses human antigen-binding polypeptides, including monoclonal antibodies and antibody-derived polypeptides to cell-specific and target antigens conjugated to a therapeutic moiety (“immunoconjugate”), such as a cytotoxin or a chemotherapeutic agent to treat cancer. As used herein, the term “immunoconjugate” refers to an antibody which is chemically or biologically linked to a cytotoxin, a radioactive agent, a cytokine, an interferon, a target or reporter moiety, an enzyme, a toxin, a peptide or protein or a therapeutic agent. The antigen-binding polypeptides, e.g., antibody, may be linked to the cytotoxin, radioactive agent, cytokine, interferon, target or reporter moiety, enzyme, toxin, peptide or therapeutic agent at any location along the molecule so long as it is able to bind its target. Examples of immunoconjugates include antibody drug conjugates and antibody-toxin fusion proteins. In one embodiment, the agent may be a second different antibody to the cell-specific or target antigens of the present invention. In certain embodiments, the antigen-binding polypeptide, e.g., antibody, may be conjugated to an agent specific for a tumor cell or a virally infected cell. The type of therapeutic moiety that may be conjugated to the antigen-binding polypeptides, e.g., antibodies, of the present invention will take into account the condition to be treated and the desired therapeutic effect to be achieved. Examples of suitable agents for forming immunoconjugates are known in the art; see for example, WO 05/103081.

[0292] Variable regions of antibodies are typically isolated as single-chain Fv (scFv) or Fab fragments. ScFv fragments are composed of V_{H} and V_{L} domains linked by a short 10-25 amino acid linker. Once isolated, scFv fragments can be genetically linked with a flexible peptide linker such as, for example, one or more repeats of Ala-Ala-Ala, Gly-Gly-Gly-Gly-Ser, etc. The resultant peptide, a tandem scFv (taFv or scFv₂) can be arranged in various ways, with V_{H}-V_{L} or V_{L}—V_{H} ordering for each scFv of the taFv. (Kontermann, R. E. In: Bispecific Antibodies. Kontermann R E (ed.), Springer Heidelberg Dordrecht London New York, pp. 1-28 (2011)).

[0293] Bispecific diabodies (dAbs) are another form of antibody fragment and are within the scope of the present invention. In contrast to taFvs, diabodies are composed of two separate polypeptide chains from, for example, antibodies A and B, each chain bearing two variable domains (V_{H}A-V_{L} B and V_{H} B—V_{L}A or V_{L}A-V_{H} B and V_{L} B—V_{H}A). The linkers joining the variable domains are short (about five amino acids), preventing the association of V_{H} and V_{L} domains on the same chain, and promoting the association of V_{H} and V_{L} domains on different chains. Heterodimers that form are functional against both target antigens, (such as, e.g., V_{H}A-V_{L} B with V_{H} B—V_{L}A or V_{L}A-V_{H} B with V_{L} B—V_{H}A), however, homodimers can also form (such as, e.g., V_{H}A-V_{L} B with V_{H}A-V_{L} B, V_{H} B—V_{L}A with V_{H} B—V_{L}A, etc.), leading to nonfunctional molecules. Several strategies exist to prevent homodimerization, including the introduction of disulfide bonds to covalently join the two polypeptide chains, modification of the polypeptide chains to include large amino acids on one chain and small amino acids on the other (knobs-into-holes structures, discussed below), and addition of cysteine residues at C-terminal extensions. Another strategy is to join the two polypeptide chains by a linker sequence, producing a single-chain diabody molecule (scDb) that exhibits a more compact structure than a taFv. ScDbs or Dbs can be also be fused to the IgG1 C_{H}3 domain or the Fc region, producing di-diabodies. Examples of di-diabodies include, but are not limited to, scDb-Fc, Db-Fc, scDb-C_{H}3, and Db—C_{H}3. Additionally, scDbs can be used to make tetravalent bispecific molecules. By shortening the linker sequence of scDbs from about 15 amino acids to about 5 amino acids, dimeric single-chain diabody molecules result, known as TandAbs (Muller, D. and Kontermann, R. E. In: Bispecific Antibodies. Kontermann R E (ed.), Springer Heidelberg Dordrecht London New York, pp. 83-100 (2011)).

[0294] The terms “V_{H}/C_{H}1” and “V_{L}/C_{L}” refer to antibody fragment constructs comprising V_{H} and C_{H}1 domains, and V_{L} and C_{L} domains, respectively, as described above.

[0295] The following examples are provided to further illustrate the methods of the present invention. These examples are illustrative only and are not intended to limit the scope of the invention in any way.

### EXAMPLES

### Example 1

### Cell-Specific, Ligand-Independent Activation of FcER1a Receptor

[0296] The term “FcER1a” refers to a Fc fragment of IgE, high affinity I, receptor for alpha polypeptide. Examples of amino acid sequences for FcER1a and nucleic acid sequences that encode FcER1a (SEQ ID NOs 1-7) are shown in Table 1 below.

TABLE 1

| SEQ | Gene/ | | Nucleic | |
|---|---|---|---|---|
| ID | Protein | | Acid/ | Other |
| NO. | Name | Organism | Polypeptide | Information |
| 1 | FcER1a | Homo sapiens | Nucleic acid | |
| 2 | FcER1a | Mus musculus | Nucleic acid | |
| 3 | FcER1a | Rattus norvegicus | Nucleic acid | |
| 4 | FcER1a | Homo sapiens | Polypeptide | |
| 5 | FcER1a | Mus musculus | Polypeptide | |
| 6 | FcER1a | Rattus norvegicus | Polypeptide | Isoform CRA_a |
| 7 | FcER1a | Rattus norvegicus | Polypeptide | Isoform CRA_b |

FcER1a is expressed in mast cells, basophils, dendritic cells, Langerhans cells and monocytes. On these cells, FcER1 has a heterotetrameric form consisting of an alpha subunit, a beta subunit, and two gamma subunits. In humans, the trimeric form of the receptor also exists, with one alpha and two gamma subunits. The alpha subunit is responsible for IgE binding. It has two extracellular Ig-like domains, a transmembrane hydrophobic region, and a positively-charged cytoplasmic tail. (Sanak, et al., 2007).

[0297] The term “PD-1” refers to programmed death-1 (also called CD279). Examples of amino acid sequences for PD-1 and nucleic acid sequences that encode PD-1 (SEQ ID NOs. 8-13) are shown in Table 2 below.

TABLE 2

| SEQ | Gene/ | | Nucleic |
|---|---|---|---|
| ID | Protein | | acid/ |
| NO. | Name | Organism | polypeptide |
| 8 | PD-1 | Homo sapiens | Nucleic acid |
| 9 | PD-1 | Mus musculus | Nucleic acid |
| 10 | PD-1 | Rattus norvegicus | Nucleic acid |
| 11 | PD-1 | Homo sapiens | Polypeptide |
| 12 | PD-1 | Mus musculus | Polypeptide |
| 13 | PD-1 | Rattus norvegicus | Polypeptide |

[0298] PD-1 is a 288 amino acid protein receptor expressed on activated T-cells and B-cells, natural killer cells and monocytes. PD-1 is a member of the CD28/CTLA-4 (cytotoxic T lymphocyte antigen)/ICOS (inducible co-stimulator) family of T-cell co-inhibitory receptors (Chen et al 2013, Nature Rev. Immunol. 13: 227-242). The primary function of PD-1 is to attenuate the immune response (Riley 2009, Immunol. Rev. 229: 114-125). PD-1 has two ligands, PD-ligand1 (PD-L1) and PD-L2. PD-L1 (CD274, B7H1) is expressed widely on both lymphoid and non-lymphoid tissues such as CD4 and CD8 T-cells, macrophage lineage cells, peripheral tissues as well as on tumor cells, virally-infected cells and autoimmune tissue cells. PD-L2 (CD273, B7-DC) has a more restricted expression than PD-L1, being expressed on activated dendritic cells and macrophages (Dong et al 1999, Nature Med.). PD-1 binding to its ligands results in decreased T-cell proliferation and cytokine secretion, compromising humoral and cellular immune responses in diseases such as cancer, viral infection and autoimmune disease. Blockade of PD-1 binding to reverse immunosuppression has been studied in autoimmune, viral and tumor immunotherapy (Ribas 2012, NEJM 366: 2517-2519; Watanabe et al 2012, Clin. Dev. Immunol. Volume 2012, Article ID: 269756; Wang et al 2013, J. Viral Hep. 20: 27-39). PD1 is thought to exist as a monomer on the cell surface.

[0299] The term “CD300A” refers to cluster of differentiation 300A. Examples of amino acid sequences for CD300A and nucleic acid sequences that encode CD300A (SEQ ID NOs. 14-26) are shown in Table 3 below.

TABLE 3

| SEQ | Gene/ | | Nucleic | |
|---|---|---|---|---|
| ID | Protein | | acid/ | Other |
| NO. | Name | Organism | polypeptide | Information |
| 14 | CD300a | Homo sapiens | Nucleic acid | Variant 1 |
| 15 | CD300a | Homo sapiens | Nucleic acid | Variant 2 |
| 16 | CD300a | Mus musculus | Nucleic acid | mRNA |
| 17 | CD300a | Mus musculus | Nucleic acid | Complete CDS |
| 18 | CD300a | Rattus norvegicus | Nucleic acid | |
| 19 | CD300a | Homo sapiens | Polypeptide | |
| 20 | CD300a | Homo sapiens | Polypeptide | Isoform CRA_a |
| 21 | CD300a | Homo sapiens | Polypeptide | Isoform CRA_b |
| 22 | CD300a | Homo sapiens | Polypeptide | Isoform CRA_c |
| 23 | CD300a | Mus musculus | Polypeptide | |
| 24 | CD300a | Mus musculus | Polypeptide | Isoform CRA_a |
| 25 | CD300a | Mus musculus | Polypeptide | Isoform CRA_b |
| 26 | CD300a | Rattus norvegicus | Polypeptide | |

CD300A is member of the seven-gene CD300 family on human chromosome 17. CD300 molecules are members of the Ig super family bearing one Ig-like domain in their extracellular portions and can be found on myeloid cells, including macrophages, neutrophils, and/or mast cells, and may regulate the activation and inflammatory response of these cells. Additionally, CD300A is expressed on human natural killer cells and is involved in cytotoxic function. Upon cross-linking with monoclonal antibodies, CD300A, inhibits FcER1a-mediated signals, resulting in the suppression of degranulation from human and mouse mast cells in vitro. (Nakahashi-Oda, et al., 2012). It is not entirely clear if CD300A exists as a monomer or a higher order structure on the cell surface.

[0300] PD-1 or CD300a (with inactivated or deleted cytosolic domain), will be co-expressed with FcER1a in rat basophil leukemia (RBL) cells. The RBL cells also express luciferase linked to a nuclear factor of activated T-cells response element (NFAT-RE).

[0301] FcER1a antibody sequences are derived from universal light chain (ULC) sequences Vk1-39 (described previously in U.S. Patent Application No. 2013/0185821 A1, incorporated herein by reference) and heavy chain sequences derived from mAbs that activate RBL/FcER1a cells (SEQ ID NOs. 192-193 and 196-198, Table 4 below.

TABLE 4

| SEQ | | | Nucleic |
|---|---|---|---|
| ID | Antibody | | acid/ |
| NO. | fragment | Organism | polypeptide |
| 192 | anti-FcER1a_VH | Artificial sequence | Nucleic acid |
| 193 | anti-FcER1a_VH | Artificial sequence | Polypeptide |
| 196 | anti-FcER1a_HCDR1 | Artificial sequence | Polypeptide |
| 197 | anti-FcER1a_HCDR2 | Artificial sequence | Polypeptide |
| 198 | anti-FcER1a_HCDR3 | Artificial sequence | Polypeptide |

[0302] PD-1 and CD300A antibody sequences are derived from ULC sequences Vk1-39 and heavy chain sequences derived from parental PD-1 (SEQ ID NOs 202-203, 206-208, 212-213, and 216-218, Table 5 below) and CD300A mAbs. ULC mAbs that bind to PD-1 that do not cross-compete for binding to soluble PD-1 have been identified. Similar mAbs against CD300A have also been identified.

TABLE 5

| SEQ | | | Nucleic |
|---|---|---|---|
| ID | Antibody | | acid/ |
| No. | fragment | Organism | polypeptide |
| 202 | anti-PD-1_VH | Artificial sequence | Nucleic acid |
| 203 | anti-PD-1_VH | Artificial sequence | Polypeptide |
| 206 | anti-PD-1_HCDR1 | Artificial sequence | Polypeptide |
| 207 | anti-PD-1_HCDR2 | Artificial sequence | Polypeptide |
| 208 | anti-PD-1_HCDR3 | Artificial sequence | Polypeptide |
| 212 | anti-PD-1_VH | Artificial sequence | Nucleic acid |
| 213 | anti-PD-1_VH | Artificial sequence | Polypeptide |
| 216 | anti-PD-1_HCDR1 | Artificial sequence | Polypeptide |
| 217 | anti-PD-1_HCDR2 | Artificial sequence | Polypeptide |
| 218 | anti-PD-1_HCDR3 | Artificial sequence | Polypeptide |

[0303] The bispecific antibodies are made recombinantly. In the first construct, the nucleic acid encoding the V_{H} portion of an anti-FcER1a antibody (SEQ ID NO: 192 for example) is fused to the C_{H} portion of an IgG1. A second construct is similarly made by fusing the nucleic acid encoding the V_{H} portion of an anti-PD-1 antibody (SEQ ID NO: 202 for example) to the C_{H} portion of an IgG1. These two constructs, along with the ULC sequences (SEQ ID NO: 275, for example), are transfected into CHO cells and are co-expressed. The resulting antibodies are purified by a protein A column, followed by affinity purification with PD-1 and FcER1a.

[0304] To demonstrate cell-specific activation of FcER1a receptors, an NFAT-luciferase assay is utilized. RBL cells are co-transfected with FcER1a, PD-1 or CD300A, and NFAT-RE-linked luciferase. Upon the cell-specific activation of FcER1a, luciferase will be transcribed, and a signal will be detected. For PD-1, a construct with an inactivated immunoreceptor tyrosine-based switch motif (ITSM) cytosolic domain (Y/F mutant) is made and validated. For CD300A, a delta-cytosolic domain construct (or ectodomain with transmembrane domain, CD300A Ecto™) is generated. CD300A Ecto™ is transfected and selected for cell surface expression.

[0305] Activation is assessed using two bispecific Abs with target antigen binding domains that each bind to the same or overlapping epitopes on FcER1a (e.g., T1 and T2 as shown in FIG. 1B). The two bispecific mAbs will have two different cell-specific antigen binding domains that each bind to different epitopes on either PD-1 or CD300A (e.g., different C1 and C2). In these experiments, non-blocking mAbs may be required in order to allow for FcER1a expression on the cell surface. The combination of antibodies is incubated with the luciferase cell line above. It is expected that the combinations of the bispecific antibodies will be able to activate the FcER1a receptors (i.e., activate the transcription of luciferase).

[0306] The cell-specific activation of FcER1a receptor may strengthen the immune system's response to antigens and may be useful in cancer treatments.

### Example 2

### Cell-Specific, Ligand-Dependent Activation of TrkB Receptor

[0307] The term “TrkB” refers to TrkB tyrosine kinase or BDNF/NT-3 growth factor receptor or neurotrophic tyrosine kinase receptor, type 2. Examples of amino acid sequences for TrkB and nucleic acid sequences that encode TrkB (SEQ ID NOs. 27-41) are shown in Table 6 below.

TABLE 6

| SEQ | Gene/ | | Nucleic | |
|---|---|---|---|---|
| ID | Protein | | acid/ | Other |
| No. | Name | Organism | polypeptide | Information |
| 27 | TrkB | Homo sapiens | Nucleic acid | |
| 28 | TrkB | Homo sapiens | Nucleic acid | Alternatively spliced |
| 29 | TrkB | Mus musculus | Nucleic acid | Variant 1 |
| 30 | TrkB | Mus musculus | Nucleic acid | Variant 2 |
| 31 | TrkB | Mus musculus | Nucleic acid | Variant 3 |
| 32 | TrkB | Rattus norvegicus | Nucleic acid | Complete CDS |
| 33 | TrkB | Rattus norvegicus | Nucleic acid | Variant 1 |
| 34 | TrkB | Rattus norvegicus | Nucleic acid | Variant 2 |
| 35 | TrkB | Homo sapiens | Polypeptide | Accession: |
| | | | | AAB33109.1 |
| 36 | TrkB | Homo sapiens | Polypeptide | Accession: |
| | | | | AAB33110.1 |
| 37 | TrkB | Mus musculus | Polypeptide | |
| 38 | TrkB | Mus musculus | Polypeptide | Isoform a |
| 39 | TrkB | Mus musculus | Polypeptide | Isoform b |
| 40 | TrkB | Rattus norvegicus | Polypeptide | Isoform 1 |
| 41 | TrkB | Rattus norvegicus | Polypeptide | Isoform 2 |

The Trk family of receptors includes TrkA, TrkB and TrkC, and is instrumental in carrying out the cellular effects of neurotrophins. TrkB is a receptor for brain-derived neurotrophic factor (BDNF) and neurotrophin-4 (NT4) ligands. Examples of amino acid sequences for BDNF and nucleic acid sequences that encode BDNF (SEQ ID NOs 42-54) are shown in Table 7 below.

TABLE 7

| SEQ | Gene/ | | Nucleic | |
|---|---|---|---|---|
| ID | protein | | acid/ | Other |
| No. | name | Organism | polypeptide | Information |
| 42 | BDNF | Homo sapiens | Nucleic acid | Variant 1 |
| 43 | BDNF | Homo sapiens | Nucleic acid | Variant 2 |
| 44 | BDNF | Homo sapiens | Nucleic acid | Variant 3 |
| 45 | BDNF | Mus musculus | Nucleic acid | Variant 1 |
| 46 | BDNF | Mus musculus | Nucleic acid | Variant 2 |
| 47 | BDNF | Mus musculus | Nucleic acid | Variant 3 |
| 48 | BDNF | Rattus norvegicus | Nucleic acid | Variant 1 |
| 49 | BDNF | Rattus norvegicus | Nucleic acid | Variant 2 |
| 50 | BDNF | Rattus norvegicus | Nucleic acid | Variant 3 |
| 51 | BDNF | Homo sapiens | Polypeptide | |
| 52 | BDNF | Mus musculus | Polypeptide | Isoform 1 |
| 53 | BDNF | Mus musculus | Polypeptide | Isoform 2 |
| 54 | BDNF | Rattus norvegicus | Polypeptide | |

Tyrosine kinase receptors activate upon contact with the neurotrophin ligand and can dimerize with monomers that are not bound to a ligand. The dimeric and monomeric forms are believed to be in equilibrium, which may be critical to regulate downstream signaling pathways. TrkB is a type 1 membrane protein and may be incorporated in endosomes upon ligand binding. TrkB contains a protein kinase domain, two leucine rich repeats and two Ig-like C2 set domains, and is expressed in both the central (CNS) and peripheral nervous systems (PNS). In the CNS, a high TrkB expression is observed in cerebral cortex, hippocampus, thalamus, choroid plexus, and granular layer of the cerebellum, brain stem, retina and the spinal cord. In the PNS, it is expressed in the cranial ganglia, vestibular system, sub-maxillary glands and the dorsal root ganglia. TrkB is also expressed in the fetal brain and in a variety of other tissues like skeletal muscles, kidneys and pancreas. (Gupta, et al., 2013).

[0308] The term “Her2” refers to human epidermal growth factor receptor 2. Examples of amino acid sequences for Her2 and nucleic acid sequences that encode Her2 (SEQ ID NOs 55 67) are shown in Table 8 below.

TABLE 8

| SEQ | Gene/ | | Nucleic | |
|---|---|---|---|---|
| ID | protein | | acid/ | Other |
| No. | name | Organism | polypeptide | Information |
| 55 | Her2/ERBB2 | Homo sapiens | Nucleic acid | Variant 1 |
| 56 | Her2/ERBB2 | Homo sapiens | Nucleic acid | Variant 2 |
| 57 | Her2/ERBB2 | Mus musculus | Nucleic acid | |
| 58 | Her2/ERBB2 | Rattus norvegicus | Nucleic acid | |
| 59 | Her2/ERBB2 | Homo sapiens | Polypeptide | Isoform CRA_a |
| 60 | Her2/ERBB2 | Homo sapiens | Polypeptide | Isoform CRA_b |
| 61 | Her2/ERBB2 | Homo sapiens | Polypeptide | Isoform CRA_c |
| 62 | Her2/ERBB2 | Mus musculus | Polypeptide | Accession: |
| | | | | AAH46811.1 |
| 63 | Her2/ERBB2 | Mus musculus | Polypeptide | Accession: |
| | | | | AAH27080.2 |
| 64 | Her2/ERBB2 | Mus musculus | Polypeptide | Accession: |
| | | | | NP_001003817.1 |
| 65 | Her2/ERBB2 | Rattus norvegicus | Polypeptide | |
| 66 | Her2/ERBB2 | Rattus norvegicus | Polypeptide | Isoform CRA_a |
| 67 | Her2/ERBB2 | Rattus norvegicus | Polypeptide | Isoform CRA_b |

HER2/erbB-2 belongs to a family of four transmembrane receptors involved in signal transduction pathways that regulate cell growth and differentiation. HER2 mediates signaling to cancer cells, causing them to proliferate. HER receptors exist as monomers but dimerize upon ligand binding. Dimers typically consist of HER2 and HER3, the latter of which has no inherent activity. Overexpression of HER2 leads to more HER2-containing heterodimers, resulting in enhanced responsiveness to stromal growth factors and oncogenic transformation. (Yarden, et al., 2001).

[0309] The term “PSMA” refers to prostate-specific membrane antigen (PSMA). Examples of amino acid sequences for PSMA and nucleic acid sequences that encode PSMA (SEQ ID NOs. 68-84) are shown in Table 9 below.

TABLE 9

| SEQ | Gene/ | | Nucleic | |
|---|---|---|---|---|
| ID | protein | | acid/ | Other |
| No. | name | Organism | polypeptide | Information |
| 68 | PSMA | Homo sapiens | Nucleic acid | Variant 1 |
| 69 | PSMA | Homo sapiens | Nucleic acid | Variant 2 |
| 70 | PSMA | Homo sapiens | Nucleic acid | Variant 3 |
| 71 | PSMA | Homo sapiens | Nucleic acid | Variant 4 |
| 72 | PSMA | Homo sapiens | Nucleic acid | Variant 5 |
| 73 | PSMA | Mus musculus | Nucleic acid | Variant 1 |
| 74 | PSMA | Mus musculus | Nucleic acid | Variant 2 |
| 75 | PSMA | Rattus norvegicus | Nucleic acid | |
| 76 | PSMA | Homo sapiens | Polypeptide | Isoform 1 |
| 77 | PSMA | Homo sapiens | Polypeptide | Isoform 2 |
| 78 | PSMA | Homo sapiens | Polypeptide | Isoform 3 |
| 79 | PSMA | Homo sapiens | Polypeptide | Isoform 4 |
| 80 | PSMA | Homo sapiens | Polypeptide | Isoform 5 |
| 81 | PSMA | Mus musculus | Polypeptide | Isoform 1 |
| 82 | PSMA | Mus musculus | Polypeptide | Isoform 2 |
| 83 | PSMA | Rattus norvegicus | Polypeptide | Accession: |
| | | | | AAC40067.1 |
| 84 | PSMA | Rattus norvegicus | Polypeptide | Accession: |
| | | | | AAB96759.1 |

PSMA is a type II membrane protein that is highly expressed in prostatic intraepithelial neoplasia and in primary and metastatic prostate cancers. PSMA expression is also higher in prostate cancer cells from hormone-refractory patients. PSMA may also be a biomarker for disease recurrence. (Yao, et al., 2009). PSMA is thought to exist primarily as a homodimer on the cell surface.

[0310] Her2 or PSMA will be co-expressed with TrkB in human embryonic kidney 293 (HEK293) cells. The HEK293 cells also express luciferase linked to a serum response element (SRE-luciferase).

[0311] TrkB antibody sequences are derived from ULC sequences and heavy chain sequences derived from parental bivalent TrkB mAbs (SEQ ID NOs 222, 224-226, 230, and 232-234, Table 10 below). Activating or blocking mAbs, as well as non-blocking mAbs, may be used. Additionally, cross competition data may be gathered for TrkB antibody sequences.

TABLE 10

| SEQ | | | Nucleic |
|---|---|---|---|
| ID | Antibody | | acid/ |
| No. | fragment | Organism | polypeptide |
| 222 | anti-TrkB_VH | Artificial sequence | Polypeptide |
| 224 | anti-TrkB_HCDR1 | Artificial sequence | Polypeptide |
| 225 | anti-TrkB_HCDR2 | Artificial sequence | Polypeptide |
| 226 | anti-TrkB_HCDR3 | Artificial sequence | Polypeptide |
| 230 | anti-TrkB_VH | Artificial sequence | Polypeptide |
| 232 | anti-TrkB_HCDR1 | Artificial sequence | Polypeptide |
| 233 | anti-TrkB_HCDR2 | Artificial sequence | Polypeptide |
| 234 | anti-TrkB_HCDR3 | Artificial sequence | Polypeptide |

[0312] Her2 and PSMA antibody sequences are derived from ULC sequences and heavy chain sequences are derived from parental Her2 (SEQ ID NOs. 238, 240-242, 246, and 248-250, Table 11 below) and PSMA mAbs (SEQ ID NO. 254-255, 258-260, 264-265, and 268-270, Table 12 below). Cross competition data may be gathered for Her2 and PSMA antibody sequences as well.

TABLE 11

| SEQ | | | Nucleic |
|---|---|---|---|
| ID | Antibody | | acid/ |
| No. | fragment | Organism | polypeptide |
| 238 | anti-Her2_VH | Artificial sequence | Polypeptide |
| 240 | anti_Her2_HCDR1 | Artificial sequence | Polypeptide |
| 241 | anti_Her2_HCDR2 | Artificial sequence | Polypeptide |
| 242 | anti_Her2_HCDR3 | Artificial sequence | Polypeptide |
| 246 | anti-Her2_VH | Artificial sequence | Polypeptide |
| 248 | anti_Her2_HCDR1 | Artificial sequence | Polypeptide |
| 249 | anti_Her2_HCDR2 | Artificial sequence | Polypeptide |
| 250 | anti_Her2_HCDR3 | Artificial sequence | Polypeptide |

TABLE 12

| SEQ | | | Nucleic |
|---|---|---|---|
| ID | Antibody | | acid/ |
| No. | fragment | Organism | polypeptide |
| 254 | anti-PSMA_VH | Artificial sequence | Nucleic acid |
| 255 | anti-PSMA_VH | Artificial sequence | Polypeptide |
| 258 | anti_PSMA_HCDR1 | Artificial sequence | Polypeptide |
| 259 | anti_PSMA_HCDR2 | Artificial sequence | Polypeptide |
| 260 | anti_PSMA_HCDR3 | Artificial sequence | Polypeptide |
| 264 | anti-PSMA_VH | Artificial sequence | Nucleic acid |
| 265 | anti-PSMA_VH | Artificial sequence | Polypeptide |
| 268 | anti_PSMA_HCDR1 | Artificial sequence | Polypeptide |
| 269 | anti_PSMA_HCDR2 | Artificial sequence | Polypeptide |
| 270 | anti_PSMA_HCDR3 | Artificial sequence | Polypeptide |

[0313] The bispecific antibodies are made recombinantly. In the first construct, the nucleic acid encoding the V_{H} portion of an anti-TrkB antibody (SEQ ID NO: 222 for example) is fused to the C_{H} portion of an IgG1. A second construct is similarly made by fusing the nucleic acid encoding the V_{H} portion of an anti-Her2 antibody (SEQ ID NO: 238 for example) or an anti PSMA antibody (SEQ ID NO: 254 for example) to the C_{H} portion of an IgG1. These two constructs, along with the ULC sequences (SEQ ID NO: 275 for example), are transfected into CHO cells and are co-expressed. The resulting antibodies are purified by a protein A column, followed by affinity purification with TrkB and the appropriate cell-specific antigen (Her2 or PSMA).

[0314] To demonstrate target cell-specific clustering of TrkB receptors, a SRE-luciferase assay is utilized. HEK293 cells are co-transfected with TrkB, Her2 or PSMA, and SRE-luciferase. Upon the cell-specific dimerization and activation of TrkB, luciferase will be transcribed, and a signal will be detected. For both Her2 and PSMA, cell surface-specific expression is selected for and cell surface density is measured.

[0315] In the presence of a BDNF mimetic (as disclosed in e.g., Massa et al., 2010), activation is assessed using two bispecific Abs with target antigen binding domains that each bind to the same or overlapping epitopes on TrkB (e.g., T1 and T2 as shown in FIG. 2B). The two bispecific mAbs will have two different cell-specific antigen binding domains that each bind to different epitopes on Her2 (e.g., different C1 and C2). In these experiments, non-blocking mAbs may be required in order to allow for expression on the cell surface. The combination of antibodies is incubated with the luciferase cell line above. It is expected that the combinations of the bispecific antibodies will be able to activate the TrkB receptors (i.e., activate the transcription of luciferase).

[0316] In the presence of a BDNF mimetic (as disclosed in e.g., Massa et al., 2010), activation is assessed using bispecific Abs with target antigen binding domains that each bind to the same or overlapping epitopes on TrkB (e.g., T1 and T2 as shown in FIG. 2B). The bispecific mAbs will have two different or overlapping/same cell-specific antigen binding domains that each bind to different epitopes on PMSA (e.g., different or same C1 and C2). In these experiments, non-blocking mAbs may be required in order to allow for expression on the cell surface. The combination of antibodies is incubated with the luciferase cell line above. It is expected that the combinations of the bispecific antibodies will be able to activate the TrkB receptors (i.e., activate the transcription of luciferase).

[0317] The activation of TrkB in CNS neurons, such as retinal ganglion cells (RGCs), can be useful for promoting neuronal survival and neurite growth. The effect on RGC survival can be tested in multiple mouse models, such as, for example, an optic nerve injury model. (Tang et al., 2011). Activation of TrkB in brain could be useful during the recovery from brain injury, such as stroke.

### Example 3

### Cell-Specific, Ligand-Dependent Activation of FGFR1c

[0318] The term “FGF21” refers to fibroblast growth factor 21. Examples of amino acid sequences for FGF21 and nucleic acid sequences that encode FGF21 (SEQ ID NOs. 85-91) are shown in Table 13 below. FGF21 is a member of the FGF family which produces beneficial effects on lipid levels, body weight and glucose metabolism in animals.

TABLE 13

| SEQ | Gene/ | | Nucleic | |
|---|---|---|---|---|
| ID | protein | | acid/ | Other |
| No. | name | Organism | polypeptide | information |
| 85 | FGF21 | Homo sapiens | Nucleic acid | |
| 86 | FGF21 | Mus musculus | Nucleic acid | |
| 87 | FGF21 | Rattus norvegicus | Nucleic acid | |
| 88 | FGF21 | Homo sapiens | Polypeptide | Isoform CRA_1 |
| 89 | FGF21 | Homo sapiens | Polypeptide | Isoform CRA_2 |
| 90 | FGF21 | Mus musculus | Polypeptide | |
| 91 | FGF21 | Rattus norvegicus | Polypeptide | |

For example, overexpression of FGF21 in transgenic mice has been shown to result in reduced glucose and triglyceride levels, and resistance to diet-induced obesity. (Kharitonenkov et al. (2005), J. Clin. Invest. 115; 1627-1635). Moreover, the administration of exogenous FGF21 to rodents and primates results in normalization of plasma glucose levels, reduced triglyceride and cholesterol levels, improved glucose tolerance and improved insulin sensitivity. (Kharitonenkov et al. (2007), Endocrinol. 148:774-781) FGF21 administration in experimental animal models has been shown to reduce body weight and body fat by increasing energy expenditure, physical activity, and metabolic rate. (Long and Kharitonenkov (2011) Biochim. Biophys. Acta 1812:791-795). FGF21 signaling is mediated through its interaction with a receptor complex that includes βKlotho (KLB) and one of three different FGF receptors (FGFR1c, FGFR2c or FGFR3c). (Ogawa et al. (2007), Proc. Natl. Acad. Sci. USA 104:7432-7437; Suzuki et al. (2008), Mol. Endocrinol. 22:1006-1014). Examples of amino acid sequences for KLB and nucleic acid sequences that encode KLB (SEQ ID NOs. 92-96) are show in in Table 14 below. Examples of amino acid sequences for FGFR1c and nucleic acid sequences that encode FGFR1c (SEQ ID NOs. 97-110) are shown in Table 15 below.

TABLE 14

| SEQ | Gene/ | | Nucleic | |
|---|---|---|---|---|
| ID | protein | | acid/ | Other |
| No. | name | Organism | polypeptide | information |
| 92 | Beta Klotho | Homo sapiens | Nucleic acid | |
| 93 | Beta Klotho | Mus musculus | Nucleic acid | |
| 94 | Beta Klotho | Mus musculus | Nucleic acid | Variant 1 |
| 95 | Beta Klotho | Homo sapiens | Polypeptide | |
| 96 | Beta Klotho | Mus musculus | Polypeptide | |

TABLE 15

| SEQ | Gene/ | | Nucleic | |
|---|---|---|---|---|
| ID | protein | | acid/ | Other |
| No. | name | Organism | polypeptide | information |
| 97 | FGFR1 | Homo sapiens | Nucleic acid | Variant 1 |
| 98 | FGFR1 | Homo sapiens | Nucleic acid | Variant 2 |
| 99 | FGFR1 | Homo sapiens | Nucleic acid | Variant 3 |
| 100 | FGFR1 | Mus musculus | Nucleic acid | Variant 1 |
| 101 | FGFR1 | Mus musculus | Nucleic acid | Variant 2 |
| 102 | FGFR1 | Mus musculus | Nucleic acid | Variant 3 |
| 103 | FGFR1 | Rattus norvegicus | Nucleic acid | |
| 104 | FGFR1 | Homo sapiens | Polypeptide | Isoform 1 |
| 105 | FGFR1 | Homo sapiens | Polypeptide | Isoform 2 |
| 106 | FGFR1 | Homo sapiens | Polypeptide | Isoform 3 |
| 107 | FGFR1 | Mus musculus | Polypeptide | Isoform 1 |
| 108 | FGFR1 | Mus musculus | Polypeptide | Isoform 2 |
| 109 | FGFR1 | Mus musculus | Polypeptide | Isoform 3 |
| 110 | FGFR1 | Rattus norvegicus | Polypeptide | |

It is believed that the main functional receptor for FGF21 signaling in vivo is the KLB/FGFR1c heterodimeric complex. Pharmacological activation of FGF21 signaling has been proposed for the treatment of various diseases and disorders in humans including type-2 diabetes, obesity, dyslipidemia, and other metabolic conditions. Proposed therapeutic strategies for activating FGF21 signaling include administration of recombinant FGF21, and the use of agonistic antibodies that bind FGFR1 or the KLB/FGFR1c complex (US 2011/0135657; US 2012/0294861; WO 2011/130417).

[0319] The term “GCGR” refers to a glucagon receptor. Examples of amino acid sequences for GCGR and nucleic acid sequences that encode GCGR (SEQ ID NOs. 111-121) are shown in Table 16 below. Glucagon likely interacts with GCGR in a similar fashion to the interaction of other peptide ligands with class B GPCRs. (Koth, et al., 2012). GCGR is thought to exist primarily as a monomer on the cell surface.

TABLE 16

| | Gene/ | | | |
|---|---|---|---|---|
| SEQ ID | protein | | Nucleic | Other |
| No. | name | Organism | acid/polypeptide | information |
| 111 | GCGR | Homo sapiens | Nucleic acid | |
| 112 | GCGR | Mus musculus | Nucleic acid | |
| 113 | GCGR | Rattus | Nucleic acid | Variant 1 |
| | | norvegicus | | |
| 114 | GCGR | Rattus | Nucleic acid | Variant 2 |
| | | norvegicus | | |
| 115 | GCGR | Homo sapiens | Polypeptide | |
| 116 | GCGR | Mus musculus | Polypeptide | Isoform CRA_a |
| 117 | GCGR | Mus musculus | Polypeptide | Isoform CRA_b |
| 118 | GCGR | Mus musculus | Polypeptide | Isoform CRA_c |
| 119 | GCGR | Rattus | Polypeptide | |
| | | norvegicus | | |
| 120 | GCGR | Rattus | Polypeptide | Isoform CRA_a |
| | | norvegicus | | |
| 121 | GCGR | Rattus | Polypeptide | Isoform CRA_b |
| | | norvegicus | | |

[0320] FGFR1c antibody sequences are derived from scFvs to FGFR1c (SEQ ID NO. 330-333, shown in Table 17 below).

TABLE 17

| SEQ ID No. | Antibody fragment | Organism | Nucleic acid/polypeptide |
|---|---|---|---|
| 330 | anti-FGFR1c_VH | human | Polypeptide |
| 331 | anti-FGFR1c_VH | human | Nucleic acid |
| 332 | anti-FGFR1c_VH | human | Polypeptide |
| 333 | anti-FGFR1c_VH | human | Nucleic acid |

[0321] ScFv binding to FGFR1 is assessed and cross competition data is obtained. GCGR antibody sequences comprise both blockers and non-blockers. (SEQ ID NO. 274-275, 278-280, 284-285, and 288-290, Table 18 below) and cross competition data for each is obtained.

TABLE 18

| | | | Nucleic acid/ |
|---|---|---|---|
| SEQ ID No. | Antibody fragment | Organism | polypeptide |
| 274 | anti-GCGR_VH | Artificial sequence | Nucleic acid |
| 275 | anti-GCGR_VH | Artificial sequence | Polypeptide |
| 278 | anti-GCGR_HCDR1 | Artificial sequence | Polypeptide |
| 279 | anti-GCGR_HCDR2 | Artificial sequence | Polypeptide |
| 280 | anti-GCGR_HCDR3 | Artificial sequence | Polypeptide |
| 284 | anti-GCGR_VH | Artificial sequence | Nucleic acid |
| 285 | anti-GCGR_VH | Artificial sequence | Polypeptide |
| 288 | anti-GCGR_HCDR1 | Artificial sequence | Polypeptide |
| 289 | anti-GCGR_HCDR2 | Artificial sequence | Polypeptide |
| 290 | anti-GCGR_HCDR3 | Artificial sequence | Polypeptide |

[0322] The bispecific antibodies are made recombinantly. In the first construct, the nucleic acid encoding the V_{H} portion of an anti-FGFR1c antibody is fused to the C_{H} portion of an IgG1. A second construct is similarly made by fusing the nucleic acid encoding the V_{H} portion of an anti-GGCR antibody (SEQ ID NO: 274 for example) to the C_{H} portion of an IgG1. These two constructs, along with the ULC sequences (SEQ ID NO: 275 for example), are transfected into CHO cells and are co-expressed. The resulting antibodies are purified by a protein A column, followed by affinity purification with FGFR1c and GGCR.

[0323] To demonstrate target cell-specific clustering of FGFR1c receptors, an SRE-luciferase assay is utilized. HEK293 cells are co-transfected with FGFR1c, GCGR, KLB, and SRE-luciferase. For GCGR, cell surface-specific expression is selected for and receptor number is determined. Upon the cell-specific clustering of FcER1a, luciferase will be transcribed, and a signal will be detected.

[0324] In the presence of an FGF21 mimetic (as disclosed in, e.g., Foltz et al., 2012), activation is assessed using bispecific Abs with target antigen binding domains that each bind to the same or overlapping epitopes on FGFR1c (e.g., T1 and T2 as shown in FIG. 2A). The two bispecific mAbs will have two different cell-specific antigen binding domains that each bind to different or same/overlapping epitopes on either GCGR (e.g., same or different C1 and C2). In these experiments, non-blocking mAbs may be required in order to allow for FGFR1c expression on the cell surface. The combination of antibodies is incubated with the luciferase cell line above. It is expected that all combinations of the bispecific antibodies will be able to dimerize FGFR1c/KLB receptor complexes and activate the receptor (i.e., activate the transcription of luciferase).

[0325] The cell-specific activation of FGFR1c receptor in liver and kidney, where GCGR is expressed, may be useful to improve aspects of the metabolic syndrome and reduce body weight in obese and diabetic individuals.

### Example 4

### Cell-Specific, Ligand-Dependent Activation of FGFR1c Wherein the Cell-Specific Antigen is Part of the Receptor Complex

[0326] FGFR1c antibody sequences are derived from scFvs to FGFR1c (SEQ ID NO. 330-333, shown in Table 17 above).

[0327] ScFv binding to FGFR1c is assessed and cross competition data is obtained. KLB antibody sequences are derived from ULC sequences and heavy chain sequences derived from parental KLB mAbs.

[0328] The bispecific antibodies are made recombinantly. In the first construct, the nucleic acid encoding the V_{H} portion of an anti-FGFR1c antibody is fused to the C_{H} portion of an IgG1. A second construct is similarly made by fusing the nucleic acid encoding the V_{H} portion of an anti-KLB antibody to the C_{H} portion of an IgG1. These two constructs, along with the ULC sequences (SEQ ID NO: 275 for example), are transfected into CHO cells and are co-expressed. The resulting antibodies are purified by a protein A column, followed by affinity purification with FGFR1c and KLB.

[0329] To demonstrate cell-specific dimerization of FGFR1c/KLB receptors, an SRE-luciferase assay is utilized. HEK293 cells are co-transfected with FGFR1c, KLB, and SRE-luciferase. For GCGR, cell surface-specific expression is selected for and cell surface density is determined. Upon the cell-specific clustering of FcER1a, luciferase will be transcribed, and a signal will be detected.

[0330] In the presence of an FGF21 mimetic (as disclosed in, e.g., Foltz et al., 2012), activation is assessed using two bispecific Abs with target antigen binding domains that each bind to the same or overlapping epitopes on FGFR1c (e.g., T1 and T2 as shown in FIG. 3B). The two bispecific mAbs will have two different cell-specific antigen binding domains that each bind to different epitopes on KLB (e.g., different C1 and C2). In these experiments, non-blocking mAbs may be required in order to allow for FGFR1c expression on the cell surface. The combination of antibodies is incubated with the luciferase cell line above. It is expected that all combinations of the bispecific antibodies will be able to dimerize FGFR1c/KLB receptor complexes and activate the receptor (i.e., activate the transcription of luciferase).

[0331] The cell-specific activation of FGFR1c receptor in hypothalamus, where may be useful in treatments related to disorders caused by hormone imbalances.

### Example 5

### Cell-Specific Activation of FGFR1c Wherein the Cell-Specific Antigen is Part of the Receptor Complex

[0332] Protein Y is expressed on adipocytes, liver and pancreas. Protein Y may be used to activate FGR1c in the presence of an FGF21 mimetic. The following combination of bispecific antibodies is used: on one bispecific antibody, a protein Y epitope A-binding domain and an FGFR1c epitope X-binding domain, and on the other bispecific antibody, a protein Y epitope B-binding domain (distinct from epitope A) and an FGFR1c epitope X-binding domain (same as the epitope for the previous bispecific antibody). Using this combination of bispecific antibodies in the presence of a FGF21 mimetic, FGFR1c is specifically activated in adipocytes, liver and pancreas.

[0333] The cell-specific activation of FGFR1c receptor in adipocytes, liver and pancreas may be useful to improve aspects of the metabolic syndrome and reduce body weight in obese and diabetic individuals.

### Example 6

### Cell-Specific, Heterologous Activation of FGFR1c Wherein the Cell-Specific Antigen is Part of the Receptor Complex

[0334] The term “CNTFRa” refers to ciliary neurotrophic factor receptor a. Examples of amino acid sequences for CNTFa and nucleic acid sequences that encode CNTFRa (SEQ ID NOs. 122-133) are shown in Table 19 below.

TABLE 19

| | Gene/ | | | |
|---|---|---|---|---|
| SEQ ID | protein | | Nucleic | Other |
| No. | name | Organism | acid/polypeptide | information |
| 122 | CNTFR | Homo sapiens | Nucleic acid | Variant 1 |
| 123 | CNTFR | Homo sapiens | Nucleic acid | Variant 2 |
| 124 | CNTFR | Homo sapiens | Nucleic acid | Variant 3 |
| 125 | CNTFR | Mus musculus | Nucleic acid | Variant 1 |
| 126 | CNTFR | Mus musculus | Nucleic acid | Variant 2 |
| 127 | CNTFR | Mus musculus | Nucleic acid | Variant 3 |
| 128 | CNTFR | Rattus | Nucleic acid | |
| | | norvegicus | | |
| 129 | CNTFR | Homo sapiens | Polypeptide | Isoform CRA_a |
| 130 | CNTFR | Mus musculus | Polypeptide | Isoform 1 |
| 131 | CNTFR | Mus musculus | Polypeptide | Isoform 2 |
| 132 | CNTFR | Rattus | Polypeptide | Isoform CRA_a |
| | | norvegicus | | |
| 133 | CNTFR | Rattus | Polypeptide | Isoform CRA_b |
| | | norvegicus | | |

[0335] The CNTF receptor complex is most closely related to the receptor complexes for interleukin-6 and leukemia inhibitory factor. CNTFRa is responsible for the specificity of the receptor and is expressed mainly in the nervous system and skeletal muscle. Signal transduction by CNTF requires that it bind first to CNTFRa, permitting the recruitment of glycoprotein 130 (gp130) and leukemia inhibitory factor receptor b (LIFR b), forming a heterotrimer receptor complex. In addition to its neuronal actions, CNTF and its analogs act on other cell types such as glia, hepatocytes, skeletal muscle, embryonic stem cells and bone marrow stromal cells (Sleeman, et al., 2000). Examples of amino acid sequences for gp130 and nucleic acid sequences that encode gp130 (SEQ ID NOs 334-339) are shown in Table 20 below. Examples of amino acid sequences for LIFR b and nucleic acid sequences that encode LIFR b (SEQ ID NOs 340-341) are shown in Table 21 below.

TABLE 20

| | Gene/Protein | | |
|---|---|---|---|
| SEQ ID No. | Name | Organism | Nucleic acid/polypeptide |
| 334 | gp130 | human | Polypeptide |
| 335 | gp130 | human | Nucleic acid |
| 336 | gp130 | mouse | Polypeptide |
| 337 | gp130 | mouse | Nucleic acid |
| 338 | gp130 | Rattus norvegicus | Polypeptide |
| 339 | gp130 | Rattus norvegicus | Nucleic acid |

TABLE 21

| SEQ ID No. | Gene/Protein Name | Organism | Nucleic acid/polypeptide |
|---|---|---|---|
| 340 | LIFR b | human | Polypeptide |
| 341 | LIFR b | human | Nucleic acid |

[0336] A bispecific antibody is made which includes a CNTFRa epitope A-binding domain and a gp130-binding domain. The other bispecific antibody includes a CNTFRa epitope B-binding domain (distinct from epitope A) and a LIFRb-binding domain. Using this combination of bispecific antibodies in the presence of a FGF21 mimetic, the heterotrimer of CNFRa, gp130, and LIFRb is formed.

[0337] The cell-specific activation of FGFR1c receptor in the nervous system, where CNTFRa is expressed, may be used to treat nervous system disorders.

### Example 7

### Cell-Specific, Ligand-Dependent, Heterologous Activation of IL4R and IL2Rgamma

[0338] Interleukin-4 (IL-4) is a cytokine produced by T helper cells, mast cells, and basophils. Examples of amino acid sequences for IL-4 and nucleic acid sequences that encode IL-4 (SEQ ID NOs. 134-141) are shown in Table 22 below.

TABLE 22

| SEQ ID | Gene/protein | | Nucleic | Other |
|---|---|---|---|---|
| No. | name | Organism | acid/polypeptide | information |
| 134 | IL-4 | Homo sapiens | Nucleic acid | Variant 1 |
| 135 | IL-4 | Mus musculus | Nucleic acid | Variant 1 |
| 136 | IL-4 | Rattus | Nucleic acid | |
| | | norvegicus | | |
| 137 | IL-4 | Homo sapiens | Polypeptide | Isoform 1 |
| | | | | precursor |
| 138 | IL-4 | Homo sapiens | Polypeptide | |
| 139 | IL-4 | Mus musculus | Polypeptide | Precursor |
| 140 | IL-4 | Mus musculus | Polypeptide | CAA28731.1 |
| 141 | IL-4 | Rattus | Polypeptide | |
| | | norvegicus | | |

IL-4 participates in growth stimulation of T cells, mast cells, granulocytes, megakaryocytes, and erythrocytes. IL-4 plays a critical role in the development of allergic diseases, and is most commonly associated with asthma, allergies, and diseases generally characterized by difficulty breathing. IL-4 binds to IL-4 receptor (IL-4R), an endogenous membrane-bound protein on the surface of certain cells. Examples of amino acid sequences for IL-4R and nucleic acid sequences that encode IL-4R (SEQ ID NOs. 142-151) are shown in Table 23 below. Upon binding of IL-4, IL-4R produces a signal that leads to clinical symptoms. Mature human IL4R has three domain structures: an extracellular domain, a membrane passage region, and an intracytoplasmic domain. (U.S. Pat. No. 7,449,201 B2).

TABLE 23

| | Gene/ | | | |
|---|---|---|---|---|
| SEQ ID | protein | | Nucleic | |
| No. | name | Organism | acid/polypeptide | Other information |
| 142 | IL-4R | Homo sapiens | Nucleic acid | Variant 1 |
| 143 | IL-4R | Homo sapiens | Nucleic acid | Variant 3 |
| 144 | IL-4R | Homo sapiens | Nucleic acid | Variant 4 |
| 145 | IL-4R | Homo sapiens | Nucleic acid | Variant 5 |
| 146 | IL-4R | Mus musculus | Nucleic acid | mRNA, complete |
| | | | | CDS |
| 147 | IL-4R | Rattus | Nucleic acid | NM_133380.2 |
| | | norvegicus | | |
| 148 | IL-4R | Rattus | Nucleic acid | X69903.1 |
| | | norvegicus | | |
| 149 | IL-4R | Homo sapiens | Polypeptide | |
| 150 | IL-4R | Mus musculus | Polypeptide | |
| 151 | IL-4R | Rattus | Polypeptide | |
| | | norvegicus | | |

[0339] The term “IL-2Rgamma” refers to interleukin-2 receptor gamma. Examples of amino acid sequences for IL-2Rgamma and nucleic acid sequences that encode IL-2Rgamma (SEQ ID NOs. 152-158) are shown in Table 24 below. IL-2Rgamma is a receptor subunit common to a number of interleukin receptors, including IL-2R and IL-4R.

[0340] Type I interferons (IFN) are a family of structurally related cytokines having antiviral, antitumor and immunomodulatory effects. The human IFNα (SEQ ID NOs. 159-164, shown in Table 25 below) locus includes two subfamilies.

TABLE 24

| | Gene/ | | | |
|---|---|---|---|---|
| SEQ ID | protein | | Nucleic | Other |
| No. | name | Organism | acid/polypeptide | information |
| 152 | IL-2Rg | Homo sapiens | Nucleic acid | |
| 153 | IL-2Rg | Mus musculus | Nucleic acid | |
| 154 | IL-2Rg | Rattus | Nucleic acid | |
| | | norvegicus | | |
| 155 | IL-2Rg | Homo sapiens | Polypeptide | |
| 156 | IL-2Rg | Mus musculus | Polypeptide | Isoform CRA_a |
| 157 | IL-2Rg | Mus musculus | Polypeptide | Isoform CRA_b |
| 158 | IL-2Rg | Rattus | Polypeptide | |
| | | norvegicus | | |

TABLE 25

| | | | Nucleic acid/ |
|---|---|---|---|
| SEQ ID NOs. | Gene/protein name | Organism | polypeptide |
| 159 | IFNA1 | Homo sapiens | Nucleic acid |
| 160 | IFNA1 | Mus musculus | Nucleic acid |
| 161 | IFNA1 | Rattus norvegicus | Nucleic acid |
| 162 | IFNA1 | Homo sapiens | Polypeptide |
| 163 | IFNA1 | Mus musculus | Polypeptide |
| 164 | IFNA1 | Rattus norvegicus | Polypeptide |

[0341] The subtypes of IFNα have different specific activities but they possess the same biological spectrum and have the same cellular receptor. The interferon β is encoded by a single gene which has approximately 50% homology with the IFNα genes (SEQ ID NOs. 165-170, shown in Table 26 below).

TABLE 26

| | | | Nucleic acid/ |
|---|---|---|---|
| SEQ ID NOs. | Gene/protein name | Organism | polypeptide |
| 165 | IFNB1 | Homo sapiens | Nucleic acid |
| 166 | IFNB1 | Mus musculus | Nucleic acid |
| 167 | IFNB1 | Rattus norvegicus | Nucleic acid |
| 168 | IFNB1 | Homo sapiens | Polypeptide |
| 169 | IFNB1 | Mus musculus | Polypeptide |
| 170 | IFNB1 | Rattus norvegicus | Polypeptide |

[0342] All human type I interferons bind to a cell surface receptor (IFN alpha receptor, IFNAR) consisting of two transmembrane proteins, IFNAR-1 and IFNAR-2. Examples of amino acid sequences for IFNAR-1 and nucleic acid sequences that encode IFNAR-1 (SEQ ID NOs 171-181) are shown in Table 27 below. Examples of amino acid sequences for IFNAR-2 and nucleic acid sequences that encode IFNAR-2 (SEQ ID NOs 182-191) are shown in Table 28 below. IFNAR-1 is essential for high affinity binding and differential specificity of the IFNAR complex. Each IFN subtype may produce diverse signaling effects upon interaction with the IFNAR complex. (U.S. Pat. No. 8,460,668 B2).

TABLE 27

| | Gene/ | | | |
|---|---|---|---|---|
| SEQ ID | protein | | Nucleic acid/ | Other |
| No. | name | Organism | polypeptide | information |
| 171 | IFNAR1 | Homo sapiens | Nucleic acid | |
| 172 | IFNAR1 | Mus musculus | Nucleic acid | |
| 173 | IFNAR1 | Rattus | Nucleic acid | Variant 1 |
| | | norvegicus | | |
| 174 | IFNAR1 | Rattus | Nucleic acid | Variant 2 |
| | | norvegicus | | |
| 175 | IFNAR1 | Homo sapiens | Polypeptide | Isoform CRA_a |
| 176 | IFNAR1 | Homo sapiens | Polypeptide | Isoform CRA_b |
| 177 | IFNAR1 | Mus musculus | Polypeptide | Isoform CRA_a |
| 178 | IFNAR1 | Mus musculus | Polypeptide | Isoform CRA_b |
| 179 | IFNAR1 | Mus musculus | Polypeptide | Isoform CRA_c |
| 180 | IFNAR1 | Rattus | Polypeptide | Isoform 1 |
| | | norvegicus | | |
| 181 | IFNAR1 | Rattus | Polypeptide | Isoform 2 |
| | | norvegicus | | |

TABLE 28

| SEQ ID | Gene/protein | | Nucleic | Other |
|---|---|---|---|---|
| No. | name | Organism | acid/polypeptide | information |
| 182 | IFNAR2 | Homo | Nucleic acid | Variant 1 |
| | | sapiens | | |
| 183 | IFNAR2 | Homo | Nucleic acid | Variant 2 |
| | | sapiens | | |
| 184 | IFNAR2 | Homo | Nucleic acid | Variant 3 |
| | | sapiens | | |
| 185 | IFNAR2 | Mus | Nucleic acid | Variant 1 |
| | | musculus | | |
| 186 | IFNAR2 | Mus | Nucleic acid | Variant 2 |
| | | musculus | | |
| 187 | IFNAR2 | Homo | Polypeptide | Isoform CRA_a |
| | | sapiens | | |
| 188 | IFNAR2 | Homo | Polypeptide | Isoform CRA_b |
| | | sapiens | | |
| 189 | IFNAR2 | Homo | Polypeptide | Isoform CRA_c |
| | | sapiens | | |
| 190 | IFNAR2 | Mus | Polypeptide | Isoform CRA_a |
| | | musculus | | |
| 191 | IFNAR2 | Mus | Polypeptide | Isoform CRA_b |
| | | musculus | | |

[0343] Her2 or PSMA is co-expressed with IL-4R and IL-2Rgamma in Ramos.2G5.4C10 cells. These cells also express luciferase linked to signal transducer and activator of transcription 3 (STAT3).

[0344] IL-4R antibody sequences are derived from ULC sequences and heavy chain sequences derived from parental bivalent IL-4R mAbs (SEQ ID NOs 314, 316-318, 322, 324-326, Table 29). Blocking mAbs, as well as non-blocking mAbs, may be used. Additionally, cross competition data may be gathered for IL-4R antibody sequences.

TABLE 29

| | | | Nucleic acid/ |
|---|---|---|---|
| SEQ ID Nos | Antibody fragment | Organism | polypeptide |
| 314 | anti-IL-4R_VH | Artificial sequence | Polypeptide |
| 316 | anti-IL-4R_HCDR1 | Artificial sequence | Polypeptide |
| 317 | anti-IL-4R_HCDR2 | Artificial sequence | Polypeptide |
| 318 | anti-IL-4R_HCDR3 | Artificial sequence | Polypeptide |
| 322 | anti-IL-4R_VH | Artificial sequence | Polypeptide |
| 324 | anti-IL-4R_HCDR1 | Artificial sequence | Polypeptide |
| 325 | anti-IL-4R_HCDR2 | Artificial sequence | Polypeptide |
| 326 | anti-IL-4R_HCDR3 | Artificial sequence | Polypeptide |

[0345] IL-2Rgamma antibody sequences are derived from ULC sequences and heavy chain sequences derived from parental bivalent IL-2Rgamma mAbs. Blocking mAbs, as well as non-blocking mAbs, may be used. Additionally, cross competition data may be gathered for IL-2Rgamma antibody sequences.

[0346] Her2 and PSMA antibody sequences are derived from ULC sequences and heavy chain sequences as discussed above.

[0347] The bispecific antibodies are made recombinantly. In the first construct, the nucleic acid encoding the V_{H} portion of an anti-IL4R antibody (SEQ ID NO: 314 for example) or an IL-2Rgamma antibody is fused to the C_{H} portion of an IgG1. A second construct is similarly made by fusing the nucleic acid encoding the V_{H} portion of an anti-Her2 antibody (SEQ ID NO: 238 for example) or an anti-PSMA antibody (SEQ ID NO: 254 for example) to the C_{H} portion of an IgG1. These two constructs, along with the ULC sequences (SEQ ID NO: 275 for example), are transfected into CHO cells and are co-expressed. The resulting antibodies are purified by a protein A column, followed by affinity purification with the appropriate target antigen (IL-4R or IL-2Rgamma) and the appropriate cell-specific antigen (Her2 or PSMA).

[0348] To demonstrate cell-specific heterodimerization of IL-4R and IL-2Rgamma receptors, a STAT3-luciferase assay is utilized. Ramos.2G5.4C10 cells are co-transfected with IL-4R, IL-2Rgamma, Her2 or PSMA, and STAT3-luciferase. For both Her2 and PSMA, cell surface-specific expression is selected for and receptor number is determined. Upon the cell-specific formation of IL-4R and IL-2Rgamma heterodimer in the presence of an IL-4 mimetic, luciferase will be transcribed, and a signal will be detected.

[0349] In the presence of an IL-4 mimetic (as disclosed in e.g., Domingues et al., 1999), activation is assessed using two bispecific Abs with target antigen binding domains that each bind to epitopes on IL4-R (e.g., T1 as shown in FIG. 1C) and IL2Rgamma (e.g., T2 as shown in FIG. 1C). The two bispecific mAbs will have two different cell-specific antigen binding domains that each bind to different epitopes on Her2 (e.g., different C1 and C2). In these experiments, non-blocking mAbs may be required in order to allow for IL4-R and IL2Rgamma on the cell surface. The combination of antibodies is incubated with the luciferase cell line above. It is expected that this combinations of the bispecific antibodies will be able to promote the formation of IL4R and IL-2Rgamma heterodimers and activate these receptors (i.e., activate the transcription of luciferase).

[0350] In the presence of an IL-4 mimetic (as disclosed in e.g., Domingues et al., 1999), activation is assessed using two bispecific Abs with target antigen binding domains that each bind to epitopes on IL4-R (e.g., T1 as shown in FIG. 1C) and IL2Rgamma (e.g., T2 as shown in FIG. 1C). The two bispecific mAbs will have two different cell-specific antigen binding domains that each bind to different or same/overlapping epitopes on PSMA (e.g., different or same C1 and C2). In these experiments, non-blocking mAbs may be required in order to allow for IL4-R and IL2Rgamma on the cell surface. The combination of antibodies is incubated with the luciferase cell line above. It is expected that both combinations of the bispecific antibodies will be able to promote the formation of IL4R and IL-2Rgamma heterodimers and activate these receptors (i.e., activate the transcription of luciferase).

[0351] The cell-specific activation of IL4R and IL-2Rgamma receptors may be useful in cancer treatments, e.g., breast cancer and prostate cancer treatments.

### Example 8

### Cell-Specific, Ligand-Dependent, Heterologous Activation of IFNAR1 and 2

[0352] IFNAR1 and IFNAR2 antibody sequences are derived from IFNAR1 and IFNAR2 scFv sequences (SEQ ID NOs 294-295, 298-300, 304-305, and 308-310, shown in Table 30 below).

TABLE 30

| SEQ | | | Nucleic acid/ |
|---|---|---|---|
| ID No. | Antibody fragment | Organism | polypeptide |
| 294 | anti-IFNAR-1_VH | Artificial sequence | Nucleic acid |
| 295 | anti-IFNAR-1_VH | Artificial sequence | Polypeptide |
| 298 | anti-IFNAR-1_HCDR1 | Artificial sequence | Polypeptide |
| 299 | anti-IFNAR-1_HCDR2 | Artificial sequence | Polypeptide |
| 300 | anti-IFNAR-1_HCDR3 | Artificial sequence | Polypeptide |
| 304 | anti-IFNAR-1_VH | Artificial sequence | Nucleic acid |
| 305 | anti-IFNAR-1_VH | Artificial sequence | Polypeptide |
| 308 | anti-IFNAR-1_HCDR1 | Artificial sequence | Polypeptide |
| 309 | anti-IFNAR-1_HCDR2 | Artificial sequence | Polypeptide |
| 310 | anti-IFNAR-1_HCDR3 | Artificial sequence | Polypeptide |

[0353] Her2 and PSMA antibody sequences are derived from ULC sequences and heavy chain sequences as discussed above.

[0354] To demonstrate target cell-specific clustering of IFNAR1 and IFNAR2, a Daudi cell assay is utilized. Daudi cells are co-transfected with IFNAR1, IFNAR2, Her2 or PSMA, and a detection agent. For both Her2 and PSMA, cell surface-specific expression is selected for and cell surface density is determined. IFNAR1 and IFNAR2 are thought to exist primarily as a heterodimer on the cell surface.

[0355] The bispecific antibodies are made recombinantly. In the first construct, the nucleic acid encoding the V_{H} portion of an anti-IFNAR1 antibody (SEQ ID NO: 294 for example) or an IFNAR2 antibody is fused to the C_{H} portion of an IgG1. A second construct is similarly made by fusing the nucleic acid encoding the V_{H} portion of an anti-Her2 antibody (SEQ ID NO: 238 for example) or an anti-PSMA antibody (SEQ ID NO: 254 for example) to the C_{H} portion of an IgG1. These two constructs, along with the ULC sequences (SEQ ID NO: 275 for example), are transfected into CHO cells and are co-expressed. The resulting antibodies are purified by a protein A column, followed by affinity purification with the appropriate target antigen (IFNAR1 or IFNAR2) and the appropriate cell-specific antigen (Her2 or PSMA).

[0356] In the presence of an IFN mimetic (as disclosed in, e.g., Ahmed et al., 2007), activation is assessed using two bispecific Abs with target antigen binding domains that each bind to epitopes on IFNAR1 (e.g., T1 as shown in FIG. 1C) and IFNAR2 (e.g., T2 as shown in FIG. 1C). The two bispecific mAbs will have two different cell-specific antigen binding domains that each bind to different epitopes on Her2 (e.g., different C1 and C2). In these experiments, non-blocking mAbs may be required in order to allow for IFNAR1 and IFNAR2 on the cell surface. The combination of antibodies is incubated with the Daudi cell line above. It is expected that this combination of the bispecific antibodies will be able to promote the formation of IFNAR1 and IFNAR2 heterodimers and activate the receptors (i.e., activate the transcription of luciferase).

[0357] In the presence of an IFN mimetic (as disclosed in, e.g., Ahmed et al., 2007), activation is assessed using two bispecific Abs with target antigen binding domains that each bind to epitopes on IFNAR1 (e.g., T1 as shown in FIG. 1C) and IFNAR2 (e.g., T2 as shown in FIG. 1C). The two bispecific mAbs will have two different cell-specific antigen binding domains that each bind to different or same/overlapping epitopes on PSMA (e.g., different or same C1 and C2). In these experiments, non-blocking mAbs may be required in order to allow for IFNAR1 and IFNAR2 on the cell surface. The combination of antibodies is incubated with the Daudi cell line above. It is expected that both combinations of the bispecific antibodies will be able to promote the formation of IFNAR1 and IFNAR2 heterodimers and activate the receptors (i.e., activate the transcription of luciferase).

[0358] The cell-specific activation of IFNAR1 and IFNAR2 receptors may be useful in the treatment of Hepatitis C, Chronic Myelogenous Leukemia, Renal Cell Carcinoma and Multiple Sclerosis.

### DOCUMENTS

[0359] AHMED, Chulbul M., et al. “IFN mimetic as a therapeutic for lethal vaccinia virus infection: possible effects on innate and adaptive immune responses.” The Journal of Immunology 178.7 (2007): 4576-4583.
[0360] ALTSCHUL, S. F., et al. (1990). Basic local alignment search tool. J Mol Biol. 215(3): 403-410.
[0361] ALTSCHUL, S. F., et al. (1997). Gapped BLAST and PSI-BLAST: a new generation of protein database search programs. Nucl. Acids Res. 25(17): 3389-3402.
[0362] CARDARELLI, J. M., et al. Interferon alpha receptor I antibodies and their use. U.S. Pat. No. 8,460,668 B2.
[0363] CHEN, L., et al. (2013). Molecular mechanisms of T cell co-stimulation and co-inhibition. Nature Reviews Immunology 13: 227-242.
[0364] DONG, H., et al. (1999). B7-H1, a third member of the B7 family, co-stimulates T-cell proliferation and interleukin-10 secretion. Nat Med 5(12): 1365-9.
[0365] DOMINGUES, Helena, et al. “Rational design of a GCN4-derived mimetic of interleukin-4.” Nature Structural & Molecular Biology 6.7 (1999): 652-656.
[0366] FACHINI, R., et al. Human fgf receptor and beta-klotho binding proteins. International Application Publication No. WO 2011/130417.
[0367] FOLTZ, Ian N., et al. “Treating diabetes and obesity with an FGF21-mimetic antibody activating the βKlotho/FGFR1c receptor complex.” Science translational medicine 4.162 (2012): 162ra153-162ra153.
[0368] GONNET, G. H., et al. (1992). Exhaustive matching of the entire protein sequence database. Science 256(5062): 1443-1445.
[0369] GUPTA, V. K., et al. (2013). TrkB Receptor Signalling: Implications in Neurodegenerative, Psychiatric and Proliferative Disorders. Int J Mol Sci 14(5): 10122-10142.
[0370] HASTEDT, J. E., et al. Storage stable power compositions of interleukin-4 receptor. U.S. Pat. No. 7,449,201 B2.
[0371] H U, S-F., et al. Human antigen binding proteins that bind beta-klotho, fgf receptors and complexes thereof. U.S. Patent Application No. 2011/0135657.
[0372] KAZANE, S. A., et al. (2013). Self-assembled antibody multimers through peptide nucleic acid conjugation. J Am Chem Soc. 135(1): 340-6.
[0373] KHARITONENKOV, A., et al. (2005). FGF-21 as a novel metabolic regulator. J Clin Invest 115: 1627-1635.
[0374] KHARITONENKOV, A., et al. (2007). The Metabolic State of Diabetic Monkeys Is Regulated by Fibroblast Growth Factor-21. Endocrinol. 148: 774-781.
[0375] KLEIN, C., et al. (2012). Progress in overcoming the chain association issue in bispecific heterodimeric IgG antibodies. mAbs 4(6): 653-663.
[0376] KÖHLER, G. and MILSTEIN, C. (1975). Continuous cultures of fused cells secreting antibody of predefined specificity. Nature 256: 495-497.
[0377] KONTERMANN, R. E., et al. (2011). Bispecific antibodies: developments and current perspectives. In: Bispecific antibodies. Kontermann, R. E. (ed.), Springer Heidelberg Dordrecht London New York, 1-28.
[0378] KOTH, C. M., et al. (2012). Molecular basis for negative regulation of the glucagon receptor. PNAS 109(36): 14393-8.
[0379] KUFER, P., et al. (2004). A revival of bispecific antibodies. Trends Biotechnol 22(5): 238-244.
[0380] LONG, Y. C., et al. (2011). Hormone-like fibroblast growth factors and metabolic regulation. Biochim Biophys Acta 1812(7): 791-5.
[0381] MASSA, Stephen M., et al. “Small molecule BDNF mimetics activate TrkB signaling and prevent neuronal degeneration in rodents.” The Journal of clinical investigation 120.5 (2010): 1774.
[0382] MULLER, D. and KONTERMANN, R. E. (2011). Diabodies, single chain diabodies and their derivatives. In: Bispecific antibodies. Kontermann, R. E. (ed.), Springer Heidelberg Dordrecht London New York, 83-100.
[0383] NAKAHASHI-ODA, C., et al. (2012). Apoptotic cells suppress mast cell inflammatory responses via the CD300a immunoreceptor. JEM 209(8): 1493-1503.
[0384] OGAWA, Y., et al. (2007). Beta-Klotho is required for metabolic activity of fibroblast growth factor 21. PNAS 104(18): 7432-7437.
[0385] PADLAN, E. A., et al. (1995). Identification of specificity-determining residues in antibodies. FASEB J. 9: 133-139.
[0386] RIBAS, A., et al. (2012). Tumor immunotherapy directed at PD-1. NEJM 366(26): 2517-9.
[0387] RILEY, J. L., et al. (2009). PD-1 signaling in primary T cells. Immunol Rev. 229:114-125.
[0388] SANAK, M., et al. (2007). Genetic Variability of the High-affinity IgE Receptor α Subunit (FεERIα) is Related to Total Serum IgE levels in Allergic Subjects. Allergology International 56: 397-401.
[0389] SCATCHARD, G. (1949). The attractions of proteins for small molecules and ions. Ann NY Acad Sci 51: 660-72.
[0390] SLEEMAN, M. W., et al. (2000). The ciliary neurotrophic factor and its receptor, CNTFRa. Pharmacochemistry Library 31: 265-272.
[0391] SONODA, J., et al. Fgfr1 agonists and methods of use. U.S. Patent Application No. 2012/0294861.
[0392] STEVENS, S., et al. High affinity antibodies to human IL-6 receptor. U.S. Patent Application No. 2007/0280945 A1.
[0393] SUZUKI, M., et al. (2008). Beta-Klotho Is Required for Fibroblast Growth Factor (FGF) 21 Signaling through FGF Receptor (FGFR) 1c and FGFR3c. Mol Endocrinol 22: 1006-1014.
[0394] TANG, Zhongshu, et al. “An optic nerve crush injury murine model to study retinal ganglion cell survival.” Journal of visualized experiments: JoVE 50 (2011).
[0395] TUTT, A., et al. (1991). Trispecific F(ab′)3 derivatives that use cooperative signaling via the TCR/CD3 complex and CD2 to activate and redirect resting cytotoxic T cells. J Immunol. 147(1): 60-69.
[0396] VAJDOS, F. F., et al. (2002). Comprehensive Functional Maps of the Antigen-binding Site of an Anti-ErbB2 Antibody Obtained with Shotgun Scanning Mutagenesis. J Mol Biol 320(2): 415-428.
[0397] WANG, X. F., et al. (2013). PD-1/PDL1 and CD28/CD80 pathways modulate natural killer T cell function to inhibit hepatitis B virus replication. Journal of Viral Hepatitis 20: 27-39.
[0398] WATANABE, N., et al. (2012). Coinhibitory Molecules in Autoimmune Diseases. Clin Dev Immunol 2012:269756.
[0399] YAO, V., et al. (2009). Expression of prostate-specific membrane antigen (PSMA), increases cell folate uptake and proliferation and suggests a novel role for PSMA in the uptake of the non-polyglutamated folate, folic acid. Prostate 70(3): 305-16.
[0400] YARDEN, Y. (2001). Biology of HER2 and its importance in breast cancer. Oncology 61(Suppl 2): 1-13.

[0401] Although illustrative embodiments of the present invention have been described herein, it should be understood that the invention is not limited to those described, and that various other changes or modifications may be made by one skilled in the art without departing from the scope or spirit of the invention.

The application's sequence listing, which the Patent Office published only in electronic form, follows.

SEQUENCE LISTING (341 sequences)

SEQ ID NO: 1 - DNA, 1199 bp, homo sapiens
dtactaagagtctccagcatcctccacctgtctaccaccgagcatgggcctatatttgaagccttagatctctccagcacagtaagcaccaggagtccatgaagaagatggctcctgccatggaatcccctactctactgtgtgtagccttactgttcttcgctccagatggcgtgttagcagtccctcagaaacctaaggtctccttgaaccctccatggaatagaatatttaaaggagagaatgtgactcttacatgtaatgggaacaatttctttgaagtcagttccaccaaatggttccacaatggcagcctttcagaagagacaaattcaagtttgaatattgtgaatgccaaatttgaagacagtggagaatacaaatgtcagcaccaacaagttaatgagagtgaacctgtgtacctggaagtcttcagtgactggctgctccttcaggcctctgctgaggtggtgatggagggccagcccctcttcctcaggtgccatggttggaggaactgggatgtgtacaaggtgatctattataaggatggtgaagctctcaagtactggtatgagaaccacaacatctccattacaaatgccacagttgaagacagtggaacctactactgtacgggcaaagtgtggcagctggactatgagtctgagcccctcaacattactgtaataaaagctccgcgtgagaagtactggctacaattttttatcccattgttggtggtgattctgtttgctgtggacacaggattatttatctcaactcagcagcaggtcacatttctcttgaagattaagagaaccaggaaaggcttcagacttctgaacccacatcctaagccaaaccccaaaaacaactgatataattactcaagaaatatttgcaacattagtttttttccagcatcagcaattgctactcaattgtcaaacacagcttgcaatatacatagaaacgtctgtgctcaaggatttatagaaatgcttcattaaactgagtgaaactggttaagtggcatgtaatagtaagtgctcaattaacattggttgaataaatgagagaatgaatagattcatttattagcatttgtaaaagagatgttcaatttcaataaaataaatataaaaccatgtaacagaatgcttctgagtaaaaaaaaaaaaaaaaaaaaaaaaaaa

SEQ ID NO: 2 - DNA, 1027 bp, Mus musculus
dtattttcgaagccatagctctctggtgcagttagcacctgaaggtgcaggggcgatggtcactggaaggtctgcccagctgtgcctagcactgctgttcatgtctcttgatgtcattctgacagccactgagaaatctgtactgaccttggacccaccatggattagaatatttacaggagagaaagtgaccctttcctgctatgggaacaatcaccttcaaatgaactctactactaaatggatccacaatggtaccgtctctgaggtgaactcttcacatttggtcattgtgagtgccaccgttcaagacagtggaaaatacatatgtcagaagcaaggattgtttaagagtaaacctgtgtacttgaatgtaacgcaagattggctgctccttcagacatctgctgacatggtcttagtccatggatcctttgacatcagatgccatggctggaagaactggaatgtccgcaaggtgatctactacaggaatgaccatgctttcaactacagttatgagagccccgtctccattagagaggccacactgaatgacagtggcacctaccactgcaagggctatcttaggcaggtgaaatatgaatctgacaaattcagaattgctgtagtaaaagcttacaaatgcaagtattattggctacaactaattttcccattgttggtggcgattctgtttgctgtggacacggggttattgctctcaaccgaagaacagttcaaatcagtcttggagattcagaagactggaaaatacaagaaagttgaaaccgaactcctaacctagatacatataggaactaatgtcattgctgaagaagcaattcttaacagtaattttctgcagaatcctcaatagcttctccactgtcaaaggccactcatgtgatccctagaaaagtctgttccacaggaattgcataaatgcttcattaaaccaactgcagctggttatgtaacatgcaataaatagcaaatactcaataaacactgccttaataagtta

SEQ ID NO: 3 - DNA, 1109 bp, Rattus norvegicus
dacttttgaagccgtagctcactggtgcagttagcacctgaaggcacaggggcaatggatactggaggatctgcccggctgtgcctagcattagtgctcatatctctgggtgtcatgctaacagccactcagaaatctgtagtgtccttggacccaccgtggattagaatacttacaggagataaagtgactcttatatgcaatgggaacaattcctctcaaatgaactctactaaatggatccacaatgatagcatctctaatgtgaaatcgtcacattgggtcattgtgagtgccaccattcaagacagtggaaaatacatatgtcagaagcaaggattttataagagcaaacctgtgtacttgaacgtgatgcaagagtggctgctgctccaatcttctgctgacgtggtcttagacaatggatcctttgacatcagatgccgtagctggaagaaatggaaagtccacaaggtgatctactacaaggacgacattgctttcaagtactcttatgacagcaacaacatctccattagaaaggccacatttaatgacagtggcagctaccactgcacaggctatttgaacaaggttgaatgtaaatctgataaattcagtattgctgtagtaaaagattacacaattgagtatcgttggctacaactcattttcccatcattggcggtgattctgtttgctgtggacactgggttatggttctcaacccacaaacagttcgaatccatcttgaagattcagaagactggaaaaggcaaaaaaaaaggttgaaacctaactcttaaccaaggtatataaaggaactaatgtcatcgcttaagagacaattcttaacaattatttcccacagtatcttcaatagcctttcaactgtcaaaggacactcatgttatccatagaaatgtctgtaccccaggaattgcataaatgcttcattaaaccaacagcagctggttaagtgacatgcaataaataacaaatactcaataaacactggtttaagaagttaaagaatgagctgattgctttgtctatatctgtaaaagagaagtacaatttgaataaagtatggaatcatgtagaatggt

SEQ ID NO: 4 - protein, 261 aa, Homo sapiens
PMKKMAPAMESPTLLCVALLFFAPDGVLAVPQKPKVSLNPPWNRIFKGENVTLTCNGNNFFEVSSTKWFHNGSLSEETNSSLNIVNAKFEDSGEYKCQHQQVNESEPVYLEVFSDWLLLQASAEVVMEGQPLFLRCHGWRNWDVYKVIYYKDGEALKYWYENHNISITNATVEDSGTYYCTGKVWQLDYESEPLNITVIKAPREKYWLQFFIPLLVVILFAVDTGLFISTQQQVTFLLKIKRTRKGFRLLNPHPKPNPKNN

SEQ ID NO: 5 - protein, 251 aa, Mus musculus
PMVTGRSAQLCLALLFMSLDVILTATEKSVLTLDPPWIRIFTGEKVTLSCYGNNHLQMNSTTKWIHNGTVSEVNSSHLVIVSATVQDSGKYICQKQGLFKSKPVYLNVTQDWLLLQTSADMILVHGSFDIRCHGWKNWNVRKVIYYRNDHAFNYSYESPVSIREATLNDSGTYHCKGYLRQVEYESDKFRIAVVKAYKCKYYWLQLIFPLLVAILFAVDTGLLLSTEEQFKSVLEIQKTGKYKKVETELLT

SEQ ID NO: 6 - protein, 102 aa, Rattus novergicus
PMNSTKWIHNDSISNVKSSHWVIVSATIQDSGKYICQKQGFYKSKPVYLNVMQEWLLLQSSADVVLDNGSFDIRCRSWKKWKVHKITQLSIVGYNSFSHHWR

SEQ ID NO: 7 - protein, 190 aa, Rattus novergicus
PMNSTKWIHNDSISNVKSSHWVIVSATIQDSGKYICQKQGFYKSKPVYLNVMQEWLLLQSSADVVLDNGSFDIRCRSWKKWKVHKVIYYKDDIAFKYSYDSNNISIRKATFNDSGSYHCTGYLNKVECKSDKFSIAVVKDYTIEYRWLQLIFPSLAVILFAVDTGLWFSTHKQFESILKIQKTGKGKKKG

SEQ ID NO: 8 - DNA, 2116 bp, Homo sapiens
dagtttcccttccgctcacctccgcctgagcagtggagaaggcggcactctggtggggctgctccaggcatgcagatcccacaggcgccctggccagtcgtctgggcggtgctacaactgggctggcggccaggatggttcttagactccccagacaggccctggaacccccccaccttctccccagccctgctcgtggtgaccgaaggggacaacgccaccttcacctgcagcttctccaacacatcggagagcttcgtgctaaactggtaccgcatgagccccagcaaccagacggacaagctggccgccttccccgaggaccgcagccagcccggccaggactgccgcttccgtgtcacacaactgcccaacgggcgtgacttccacatgagcgtggtcagggcccggcgcaatgacagcggcacctacctctgtggggccatctccctggcccccaaggcgcagatcaaagagagcctgcgggcagagctcagggtgacagagagaagggcagaagtgcccacagcccaccccagcccctcacccaggccagccggccagttccaaaccctggtggttggtgtcgtgggcggcctgctgggcagcctggtgctgctagtctgggtcctggccgtcatctgctcccgggccgcacgagggacaataggagccaggcgcaccggccagcccctgaaggaggacccctcagccgtgcctgtgttctctgtggactatggggagctggatttccagtggcgagagaagaccccggagccccccgtgccctgtgtccctgagcagacggagtatgccaccattgtctttcctagcggaatgggcacctcatcccccgcccgcaggggctcagctgacggccctcggagtgcccagccactgaggcctgaggatggacactgctcttggcccctctgaccggcttccttggccaccagtgttctgcagaccctccaccatgagcccgggtcagcgcatttcctcaggagaagcaggcagggtgcaggccattgcaggccgtccaggggctgagctgcctgggggcgaccggggctccagcctgcacctgcaccaggcacagccccaccacaggactcatgtctcaatgcccacagtgagcccaggcagcaggtgtcaccgtcccctacagggagggccagatgcagtcactgcttcaggtcctgccagcacagagctgcctgcgtccagctccctgaatctctgctgctgctgctgctgctgctgctgctgcctgcggcccggggctgaaggcgccgtggccctgcctgacgccccggagcctcctgcctgaacttgggggctggttggagatggccttggagcagccaaggtgcccctggcagtggcatcccgaaacgccctggacgcagggcccaagactgggcacaggagtgggaggtacatggggctggggactccccaggagttatctgctccctgcaggcctagagaagtttcagggaaggtcagaagagctcctggctgtggtgggcagggcaggaaacccctccacctttacacatgcccaggcagcacctcaggccctttgtggggcagggaagctgaggcagtaagcgggcaggcagagctggaggcctttcaggcccagccagcactctggcctcctgccgccgcattccaccccagcccctcacaccactcgggagagggacatcctacggtcccaaggtcaggagggcagggctggggttgactcaggcccctcccagctgtggccacctgggtgttgggagggcagaagtgcaggcacctagggccccccatgtgcccaccctgggagctctccttggaacccattcctgaaattatttaaaggggttggccgggctcccaccagggcctgggtgggaaggtacaggcgttcccccggggcctagtacccccgccgtggcctatccactcctcacatccacacactgcacccccactcctggggcagggccaccagcatccaggcggccagcaggcacctgagtggctgggacaagggatcccccttccctgtggttctattatattataattataattaaatatgagagcatgctaaggaaaa

SEQ ID NO: 9 - DNA, 1973 bp, Mus musculus
dtgagcagcggggaggaggaagaggagactgctactgaaggcgacactgccaggggctctgggcatgtgggtccggcaggtaccctggtcattcacttgggctgtgctgcagttgagctggcaatcagggtggcttctagaggtccccaatgggccctggaggtccctcaccttctacccagcctggctcacagtgtcagagggagcaaatgccaccttcacctgcagcttgtccaactggtcggaggatcttatgctgaactggaaccgcctgagtcccagcaaccagactgaaaaacaggccgccttctgtaatggtttgagccaacccgtccaggatgcccgcttccagatcatacagctgcccaacaggcatgacttccacatgaacatccttgacacacggcgcaatgacagtggcatctacctctgtggggccatctccctgcaccccaaggcaaaaatcgaggagagccctggagcagagctcgtggtaacagagagaatcctggagacctcaacaagatatcccagcccctcgcccaaaccagaaggccggtttcaaggcatggtcattggtatcatgagtgccctagtgggtatccctgtattgctgctgctggcctgggccctagctgtcttctgctcaacaagtatgtcagaggccagaggagctggaagcaaggacgacactctgaaggaggagccttcagcagcacctgtccctagtgtggcctatgaggagctggacttccagggacgagagaagacaccagagctccctaccgcctgtgtgcacacagaatatgccaccattgtcttcactgaagggctgggtgcctcggccatgggacgtaggggctcagctgatggcctgcagggtcctcggcctccaagacatgaggatggacattgttcttggcctctttgaccagattcttcagccattagcatgctgcagaccctccacagagagcaccggtccgtccctcagtcaagaggagcatgcaggctacagttcagccaaggctcccagggtctgagctagctggagtgacagcccagcgcctgcaccaattccagcacatgcactgttgagtgagagctcacttcaggtttaccacaagctgggagcagcaggcttcccggtttcctattgtcacaaggtgcagagctggggcctaagcctatgtctcctgaatcctactgttgggcacttctagggacttgagacactatagccaatggcctctgtgggttctgtgcctggaaatggagagatctgagtacagcctgctttgaatggccctgtgaggcaaccccaaagcaagggggtccaggtatactatgggcccagcacctaaagccacccttgggagatgatactcaggtgggaaattcgtagactgggggactgaaccaatcccaagatctggaaaagttttgatgaagacttgaaaagctcctagcttcgggggtctgggaagcatgagcacttaccaggcaaaagctccgtgagcgtatctgctgtccttctgcatgcccaggtacctcagtttttttcaacagcaaggaaactagggcaataaagggaaccagcagagctagagccacccacacatccagggggcacttgactctccctactcctcctaggaaccaaaaggacaaagtccatgttgacagcagggaaggaaagggggatataaccttgacgcaaaccaacactggggtgttagaatctcctcattcactctgtcctggagttgggttctggctctccttcacacctaggactctgaaatgagcaagcacttcagacagtcagggtagcaagagtctagctgtctggtgggcacccaaaatgaccagggcttaagtccctttcctttggtttaagcccgttataattaaatggtaccaaaagctttaaaaaaaaaaaaaaaaaaaaaaaaaaaaaaaaaaaaaaaaaa

SEQ ID NO: 10 - DNA, 1928 bp, Rattus novergicus
dtgagcagcggaggaggaggaggaagaagagaccgtgactgaagacacagccaggggctctgggcatgtgggtccagcaggtaccctggtcattcacttgggctgtgctacagttgagctggcaatcagggtggcttctagaggtcctcaataagccctggaggcccctcaccttctccccaacctggctcacagtgtcagagggagcaaatgccaccttcacctgcagtttctccaactggtcggaggatcttaagctgaactggtaccgtctgagtcccagcaaccagactgaaaaacaggccgccttctgcaatggttacagccagcccgtccgggatgcccgcttccagatcgtacaactgcccaacggacatgacttccacatgaacatcctcgatgcacggcgcaatgacagtggcatctacctctgtggggccatctccctgcctcccaaggcacaaatcaaagagagtcctggagcagagcttgtggtaacagagagaatcctggagaccccaacaagatatcccagaccctcacccaagccagaaggccagtttcaaggcttggtcattgtcatcatgagcgtcctagtgggtatccccgtgttgctgctgctggcctgggctctcgctgccttctgctcaacaggtatgtcagaggccagagaagctggacgcaaggaagaccctccgaaggaggcgcatgcagcagcccctgttcccagtgtggcctacgaggagctggactttcagggacgagagaagacaccagagcctgccccctgtgtgcacacagaatacgccaccattgtcttcactgaaggactggatgcctcagccataggacgtaggggctcagctgatggcccacagggtcctcggcctccaagacatgaggatggacactgctcttggcctctttgaccagactcttcagccattagcatgccccaggccctccacagagagcactggtccattcctccgtcaagaggaacgtgcaagctacagttcagcaaagctcccaggatctgagctatctggagtgacagcgcttgcactgttgagtgagagctctcttcgtgtttaccgcaagctgggaacaaccagcttccctgtttcctcttgtcacagggtgcagagctggcctaagcctagtctcctgaatcctattgttgggcacttctagggacttgagacactgtagcctatggcgtctgtgggttctgtgtctggaaatggagagacctggttacagcctgactttgagtagccctgtgaggcaaccccataacacgagggtccagctatgcagtgggcccagcacctaaagtcacccttgggagatactcaggtgggaaattcttaggctgggggactgaaatgatccagagacctggaaaagttttgatgaagaccagaaaagctcctagcttcagggtttcgggaagcctgaacactttccaggtaacagctccatgagagtccttgctgtccttctgcacctcagttctttctacagcagggaaactaaggcaataaaaggaaccagcaaagctagagatccacccacacctccagtgaggcactcgagtctccctacccctcctaggaaccaaaaggacaaggtccatgtcagcagcagggaaggaaaggggggacacaattttgattcataccaactctgcccacagcaggcagtggtttaagtgttcggatctcctcattcaccctgtcctggggtccagttctggctctccatcacagcgtagggccctgagatgggcaaatgttttaagggttcccttggcactccagacagtcaagagcctagctgtctggtgggcaccctaaatgaccaggactcaagagtccctttcctttggtttaagcccattataattaaatggttacaaaagcttt

SEQ ID NO: 11 - protein, 289 aa, Homo sapiens
PMQIPQAPWPVVWAVLQLGWRPGWFLDSPDRPWNPPTFSPALLVVTEGDNATFTCSFSNTSESFVLNWYRMSPSNQTDKLAAFPEDRSQPGQDCRFRVTQLPNGRDFHMSVVRARRNDSGTYLCGAISLAPKAQIKESLRAELRVTERRAEVPTAHPSPSPRPAGQFQTLVVGVVGGLLGSLVLLVWVLAVICSRAARGTIGARRTGQPLKEDPSAVPVFSVDYGELDFQWREKTPEPPVPCVPEQTEYATIVFPSGMGTSSPARRGSADGPRSAQPLRPEDGHCSWPL

SEQ ID NO: 12 - protein, 289 aa, Mus musculus
PMWVRQVPWSFTWAVLQLSWQSGWLLEVPNGPWRSLTFYPAWLTVSEGANATFTCSLSNWSEDLMLNWNRLSPSNQTEKQAAFCNGLSQPVQDARFQIIQLPNRHDFHMNILDTRRNDSGIYLCGAISLHPKAKIEESPGAELVVTERILETSTRYPSPSPKPEGRFQGMVIGIMSALVGIPVLLLLAWALAVFCSTSMSEARGAGSKDDTLKEEPSAAPVPSVAYEELDFQGREKTPELPTACVHTEYATIVFTEGLGASAMGRRGSADGLQGPRPPRHEDGHCSWPL

SEQ ID NO: 13 - protein, 288 aa, Rattus novergicus
PMWVQQVPWSFTWAVLQLSWQSGWLLEVLNKPWRPLTFSPTWLTVSEGANATFTCSFSNWSEDLKLNWYRLSPSNQTEKQAAFCNGYSQPVRDARFQIVQLPNGHDFHMNILDARRNDSGIYLCGAISLPPKAQIKESPGAELVVTERILETPTRYPRPSPKPEGQFQGLVIVIMSVLVGIPVLLLLAWALAAFCSTGMSEAREAGRKEDPPKEAHAAAPVPSVAYEELDFQGREKTPEPAPCVHTEYATIVFTEGLDASAIGRRGSADGPQGPRPPRHEDGHCSWPL

SEQ ID NO: 14 - DNA, 1894 bp, Homo sapiens
dcggggaagtgagagtcggggatcagtcctgcaagctacggagtcactacagggagaggtctcatcactagaaatagccgaagaacctgcagcctcaaccagcgttaaggaggacgtgccgtttctagggagtcttagtcggggctcaccagcttcctgcattttctgaccggctccaggaatagaaccaaaagaagctgaacaaggaagcagcgcggcaccaagaaaagcagaagtcggggccttggaggcgtgactttcccctcgggtccaggtagggcctggagctgctgcaagtgccgcctgtgctggggaagggaccatgtggctgccttgggctctgttgcttctctgggtcccaggatgttttgctctgagcaaatgcaggaccgtggcgggccccgtggggggatccctgagtgtgcagtgtccctatgagaaggaacacaggaccctcaacaaatactggtgcagaccaccacagattttcctatgtgacaagattgtggagaccaaagggtcagcaggaaaaaggaacggccgagtgtccatcagggacagtcctgcaaacctcagcttcacagtgaccctggagaatctcacagaggaggatgcaggcacctactggtgtggggtggatacaccatggctccgagactttcatgatcccgttgtcgaggttgaggtgtccgtgttcccggcatcaacgtcaatgacacctgcaagtatcactgcggccaagacctcaacaatcacaactgcatttccacctgtatcatccactaccctgtttgcagtgggtgccacccacagtgccagcatccaggaggaaactgaggaggtggtgaactcacagctcccgctgctcctctccctgctggcattgttgctgcttctgttggtgggggcctccctgctagcctggaggatgtttcagaaatggatcaaagctggtgaccattcagagctgtcccagaaccccaagcaggctgccacgcagagtgagctgcactacgcaaatctggagctgctgatgtggcctctgcaggaaaagccagcaccaccaagggaggtggaggtggaatacagcactgtggcctcccccagggaagaacttcactatgcctcggtggtgtttgattctaacaccaacaggatagctgctcagaggcctcgggaggaggaaccagattcagattacagtgtgataaggaagacataggcttttgtcctgcctcgccatcggagctctcatgggccccaggaagtccagggacagctcccttatacctggcccacgtccttctcagcctgccctcgacaacagtgaccaacagacaggcagctgggtttcccaggccatccctctgttgccatcagcttgattggcttccccgagggccagcagggctgggggctccggagagcagcaggaagcactcccagccaccagtgcctgtcacctctttcccctttgcccctgcttcatcccagctctgtgtgtggaggacaaagcttcttcctgcgtggctccaggaaaagatgtggctcacgtaggtggcacctgccaatagctttgtcaatcacagccccataggaacgtctggaattgcttgggagttggggagaactgtcaagaagagtgaagagagtgccaaagcggagatctgttcacctgggggccatggaggggggacccactaaagatcaagatcaaagattctccccatctcacagacaaggaaactgaggccagagggaggagagaattgctcatggctccagaactggtggcaagtttctctggactcttaggtttatttttaatatgaaatataaaaacagtttcaaatatcttattgagggagaagtaaaaacttatttaaacaatgcc

SEQ ID NO: 15 - DNA, 1555 bp, Homo sapiens
dcggggaagtgagagtcggggatcagtcctgcaagctacggagtcactacagggagaggtctcatcactagaaatagccgaagaacctgcagcctcaaccagcgttaaggaggacgtgccgtttctagggagtcttagtcggggctcaccagcttcctgcattttctgaccggctccaggaatagaaccaaaagaagctgaacaaggaagcagcgcggcaccaagaaaagcagaagtcggggccttggaggcgtgactttcccctcgggtccaggtagggcctggagctgctgcaagtgccgcctgtgctggggaagggaccatgtggctgccttgggctctgttgcttctctgggtcccagcatcaacgtcaatgacacctgcaagtatcactgcggccaagacctcaacaatcacaactgcatttccacctgtatcatccactaccctgtttgcagtgggtgccacccacagtgccagcatccaggaggaaactgaggaggtggtgaactcacagctcccgctgctcctctccctgctggcattgttgctgcttctgttggtgggggcctccctgctagcctggaggatgtttcagaaatggatcaaagctggtgaccattcagagctgtcccagaaccccaagcaggctgccacgcagagtgagctgcactacgcaaatctggagctgctgatgtggcctctgcaggaaaagccagcaccaccaagggaggtggaggtggaatacagcactgtggcctcccccagggaagaacttcactatgcctcggtggtgtttgattctaacaccaacaggatagctgctcagaggcctcgggaggaggaaccagattcagattacagtgtgataaggaagacataggcttttgtcctgcctcgccatcggagctctcatgggccccaggaagtccagggacagctcccttatacctggcccacgtccttctcagcctgccctcgacaacagtgaccaacagacaggcagctgggtttcccaggccatccctctgttgccatcagcttgattggcttccccgagggccagcagggctgggggctccggagagcagcaggaagcactcccagccaccagtgcctgtcacctctttcccctttgcccctgcttcatcccagctctgtgtgtggaggacaaagcttcttcctgcgtggctccaggaaaagatgtggctcacgtaggtggcacctgccaatagctttgtcaatcacagccccataggaacgtctggaattgcttgggagttggggagaactgtcaagaagagtgaagagagtgccaaagcggagatctgttcacctgggggccatggaggggggacccactaaagatcaagatcaaagattctccccatctcacagacaaggaaactgaggccagagggaggagagaattgctcatggctccagaactggtggcaagtttctctggactcttaggtttatttttaatatgaaatataaaaacagtttcaaatatcttattgagggagaagtaaaaacttatttaaacaatgcc

SEQ ID NO: 16 - DNA, 4643 bp, Mus musculus
dgaggagtgactgggtgccagtcagaatgaaacctggccctgcaccctgagccagacgcaagcaggggtcatcaggctgtcatggcagcctggcagtcatgagatcagagcctcacggggggttcatcagctcgcctcggctccttccgattcttttagtttctcccgtagctccaggaacagaactgaggaaagtcggaagcaaaacagctagacacaaagaaaagcagaagtgggcgtctcagagactggccgtcccccagcgggactgaaccgtggagcgtccagccgtggcctgcctgccggtgacccgtgtgtgggagaaatgacccaactggcctcagctgtgtggctgcccacactgttgctgctgctgctgcttttttggcttccaggctgtgtccctctgcatggtcccagcaccatgtcaggaagtgtaggtgaatccctgagtgtgtcatgtcgatatgaggagaaattcaagactaaggacaaatactggtgcagagtgtcacttaagatactatgtaaagatattgtcaagaccagcagctcagaagaagctaggagtggccgagtgaccatcagggaccatccagacaacctcacctttacagtgacctatgagagcctcaccctggaggatgcagacacctacatgtgtgcggtggatatatcactttttgatggctccttggggttcgataagtacttcaagattgagttgtctgtggttccaagtgaggacccagtttcatctccaggaccaacactagagacacctgtggtgtccaccagtctgcctaccaagggtcccgccctaggatccaacacagagggccaccgtgaacatgactattcccagggcttgaggctcccagcgctgttgtctgtgttagctctcctgctgtttctgttggtggggacctctctgctggcctggaggatgttccagaagcggctggtcaaagctgataggcatccagagctgtcccagaacctcagacaggcttctgagcagaatgagtgccagtatgtgaatttgcagctgcacacgtggtctctgagggaagagccggtgctaccaagtcaggtagaagtggtggaatatagcacattggcattaccccaggaagagcttcactattcatccgtggcattcaactcccagaggcaggattctcacgccaatggagattctcttcatcaacctcaggaccagaaagcagagtacagtgagatccagaagcccagaaaaggactctctgacctttacctgtgactccttgtcacctgatcctctcagtggtgactaccaggttccaaggctccctgctggctgctgccctcaatgtcatgagcctcagtggcttcactaaagatgagcaggagccagggctctgtgggcacagtctcatcccactggctctctcctcttagcctgtattttgttctgcctctgggtgtggaagacatcgatgctgctcttttggggctctgggaattgacatggttcgtatagaacggtacttgtgttagttagctttgtagtgtcagtccaggaagaacatctgtggtcactgggaaagtgggggacccatgagactacaaaggaaggggagtcatggaggtactaaacaccaactccttcatctcacagagaaaaaaacctaagctctgaggacaaaagcctggcccgtggcaccaaggtcaggggcaaattcctctggactcatttttatttttattttttgttttttgagacagggtctctctgtgtagctttggctgtcctggaactcactctgtaaaccagaatggcctcagactcacaaagatctgcctgcctctgcctccaaaggtgtgtgccacaatgcctggcttctctgaattcttaagtaaaagatgaaataaagtttataatatcttttaaaaaaagattatttatttattatatgtaagtacactgaagctatcttcagacactccagaaaagggcatcagatctcactatgtttggttgtgagccaccatgtggttgctgggatttgaactcaggaccttcagaagagcagtcagtgctcttaaccactgagccatctctccagccctaaaatacctttttaaagggagaagaaatggtttaaatgatgtctgttacatgcctgtagccccctattaaagcccagctttgaagtcagaggagcctttggggttcaaggggttgggaaggacataccaactgctgttcttgatggaacacacaagagtgttttcttaccagggtgattttaaacttgcatcaaagatgactgtgtttccaggctgcagtagctaccaatggtttgatctgcccaaatgatttttcttacaactctttttttttttaaagatttatttattattatatctaagtacactgtagctgtcttcagacacaccagaagaggacctcagatctcattacggatggttgtgagccaccatgtggttgctgggctttgaactcaggaccttcggaagagcagtcggtactcttaaccactgagccatctctccagccacttcttacaactcttaacactgtgccagaagcaactcctagggtaagctgcccccagagtggtaggatgatggctatttgtgacttctttgaattttttttaaagacagaattcttgctgggtggtggtgcacacctttgatcctagcacttgggaggcagaggcaggcaggtctctgagtttgagaccagcttggtttacagagtgagttctaggacagccagggctacacagagaaaccctgtgtcaacaaacaaacaaatgacgggattctttatagcccagattagcctttgaacttgctgtgtggtcaaggatgactttttagttaatgttttattgccgtgaagagaccccatgatcaaggtgactcttatagcagaaaacatttaactggggctggcttacagttcagaggttcagtccattatcatcatggcaggaagggctttcttctccagcctgaatcctttagatttcagttcatgtaccccaccctcctccgcctgtgcatgtgctcgtggtatgcacacccatgactcatccccccttcttgtactaatgttttgagacataaaaggggaaacacacatacacggatggatacacgcccaaagccaggttccacggtgtgtgggaaatgtgtcaggacagtagggactatgggtacagcaaacagagccctgatctgctctcagctctgtcccaggccataaccccaaacccaccagtggttcttttctcttgaaagagcagtgggcactgggacgcgcagatgggacttaagagtcttaagaggggaagtagggatgctgtggccaaaaatagagggctacgcccatgaacagctcggacacaaaggtttagttgggtgactaaattagactgccaactaggagggatgggtagggaaaggggagccctgcttcccagtgtgagtcactcattgtgggtggcccaagtgcccagtcagaggcagttttcatcacctatggacatgtctcttccttcactttcttctcctcatctgtttcctcttcctgctgcctgggccagatcagcccaagggcatctttcattaatctcttcattccttccttcattctcccatttattcaactattcactcacctactcacccatccaactgtccatcctcccaacctcccatccatccacccatccacccatccatccatccatccatccatccatccatccatccacctacccacctacccacccagccatccatctatccacccactcatccatccacacatccaccatccaccccacccatctatttactcacctacccatctatccacccacccatcaattcatccatccatccatccatctatccatccatccatctgtccatccattccatatttcatacactccctgcagagcatttagggacctgcttcacaacagacagaagactggaaacagggaagcataggacaaaacccctgccccacatagacttttgtgtttacagggatatagacatggccttctctattcacccctctgctttaggactgtgggcagggaggggcactgactcagatgcagtcctcagtaaacagtgagtgggtagatggatggacagatggatgggtaggtaggtgggtaggtgggtagatggatagatgggtgtatgtgtgtatgtgtgtatgtgtatatgtatgtatgtatgtattatgtatgtaacagtttcctgctaaagaactgaaaagctgaatgctcctaatttatgctaaagagtggccatcagggctggagaggaggctcagtgggtgaaagtgcttgccacacaagtgcaagggcccgagcttggtccccagaacccatataaaaagctggatgtgtggtctgctcagtgggtgaaatgcttaccatacaaggctggtgacctgagtttggtccctagaattcatataaagatggaaggagaggaccaagtatacagagttgtcctctgacctccacaccatggcacaggagcccctctcccactcccacaaataatcatttaaattgtaaaaataataaaaaaataatgtg

SEQ ID NO: 17 - DNA, 3144 bp, Mus musculus
dgggtcatcaggctgtcatggcagcctggcagtcatgagatcagagcctcacggggggttcatcagctcgcctcggctccttccgattcttttagtttctcccgtagctccaggaacagaactgaggaaagtcggaagcaaaacagctagacacaaagaaaagcagaagtgggcgtctcagagactggccgtcccccagcgggactgaaccgtggagcgtccagccgtggcctgcctgccggtgacccgtgtgtgggagaaatgacccaactggcctcagctgtgtggctgcccacactgttgctgctgctgctgcttttttggcttccaggctgtgtccctctgcatggtcccagcaccatgtcaggaagtgtaggtgaatccctgagtgtgtcatgtcgatatgaggagaaattcaagactaaggacaaatactggtgcagagtgtcacttaagatactatgtaaagatattgtcaagaccagcagctcagaagaagctaggagtggccgagtgaccatcagggaccatccagacaacctcacctttacagtgacctatgagagcctcaccctggaggatgcagacacctacatgtgtgcggtggatatatcactttttgatggctccttggggttcgataagtacttcaagattgagttgtctgtggttccaagtgaggacccagtttcatctccaggaccaacactagagacacctgtggtgtccaccagtctgcctaccaagggtcccgccctaggatccaacacagagggccaccgtgaacatgactattcccagggcttgaggctcccagcgctgttgtctgtgttagctctcctgctgtttctgttggtggggacctctctgctggcctggaggatgttccagaagcggctggtcaaagctgataggcatccagagctgtcccagaacctcagacaggcttctgagcagaatgagtgccagtatgtgaatttgcagctgcacacgtggtctctgagggaagagccggtgctaccaagtcaggtagaagtggtggaatatagcacattggcattaccccaggaagagcttcactattcatccgtggcattcaactcccagaggcaggattctcacgccaatggagattctcttcatcaacctcaggaccagaaagcagagtacagtgagatccagaagcccagaaaaggactctctgacctttacctgtgactccttgtcacctgatcctctcagtggtgactaccaggttccaaggctccctgctggctgctgccctcaatgtcatgagcctcagtggcttcactaaagatgagcaggagccagggctctgtgggcacagtctcatcccactggctctctcctcttagcctgtattttgttctgcctctgggtgtggaagacatcgatgctgctcttttggggctctgggaattgacatggttcgtatagaacggtacttgtgttagttagctttgtagtgtcagtccaggaagaacatctgtggtcactgggaaagtgggggacccatgagactacaaaggaaggggagtcatggaggtactaaacaccaactccttcatctcacagagaaaaaaacctaagctctgaggacaaaagcctggcccgtggcaccaaggtcaggggcaaattcctctggactcatttttatttttattttttgttttttgagacagggtctctctgtgtagctttggctgtcctggagctcactctgtggaccagaatggcctcggactcacaaagatctgcctgcctctgcctccaaaggtgtgtgccacaatgcctggcttctctgaattcttaagtaaaagatgaaataaagtttataatatcttttaaaaaaagattatttatttattatatgtaagtacactgaagctatcttcagacactccagaaaagggcatcagatctcactatgtttggttgtgagccaccatgtggttgctgggatttgaactcaggaccttcagaagagcagtcagtgctcttaaccactgagccatctctccagccctaaaatacctttttaaagggagaagaaatggtttaaatgatgtctgttacatgcctgtagccccctattaaagcccagctttgaagtcagaggagcctttggggttcaaggggttgggaaggacataccaactgctgttcttgatggaacacacaagagtgttttcttaccagggtgattttaaacttgcatcaaagatgactgtgtttccaggctgcagtagctaccaatggtttgatctgcccaaatgatttttcttacaactctttttttttttaaagatttatttattattatatctaagtacactgtagctgtcttcagacacaccagaagaggacctcagatctcattacggatggttgtgagccaccatgtggttgctgggctttgaactcaggaccttcggaagagcagtcggtactcttaaccactgagccatctctccagccacttcttacaactcttaacactgtgccagaagcaactcctagggtaagctgcccccagagtggtaggatgatggctatttgtgacttctttgaattttttttaaagacagaattcttgctgggtggtggtgcacacctttgatcctagcacttgggaggcagaggcaggcaggtctctgagtttgagaccagcttggtttgcagagtgagttctaggacagccagggctacacagagaaaccctgtgtcaacaaacaaacaaatgacgggattctttatagcccagattagcctttgaacttgctgtgtggtcaaggatgactttttagttaatgttttattgccgtgaagagaccccatgatcaaggtgactcttatagcagaaaacatttaactggggctggcttacagttcagaggttcagtccattatcatcatggcaggaagggctttcttctccagcctgaatcctttagatttcagttcatgtaccccaccctcctccgcctgtgcatgtgctcgtggtatgcacacccatgactcatccccccttcttgtactaatgttttgagacataaaaggggaaacacacatacacggatggatacacgcccaaagccaggttccacggtgtgtgggaaatgt

SEQ ID NO: 18 - DNA, 1515 bp, Rattus novergicus
dgagaagtgacttgacgccaatcagaatgaagcctggccctgcaccctgagctagacgcaagcaggggtcattaggctgtgatagcagcctggcggtcatgagatccgtgcctcacaccagcttcctcagctcgcctgggctccttccgagtgtttcagtttctctgtagctccaggaacagaactaagaaaagtcagaatcaaaacagctagacacaaagaaaagcagaagtgggcgtctcagagactggccgggtcctcctgctgggctgaaccgtggagcgtccagctgtggcctgcctgccggtgacccatgtgtgggagaaatgacccagctggcctcagctgtgtggctgcccacgctgttgctgctgctgcttttctgggttccaggctgtgtccctcttcgtggccccagcagtgtgacaggaactgtgggggagtccctgaacgtgacttgtcagtatgaggagagattcaagatgaataagaaatactggtgcagagggtcacttgttctactttgcaaagatattgtcaagaccggaggctcagaagaagctaggaatggccgagtgtccatcagggacgatcgagacaacctgaccttcacagtgaccttgcagaacctcacgctggaggatgcaggcacctacatgtgtgcggtggatataccattgatcgatcactccttcaaggttgaattgtctgtggtcccaggtaacatcccagtttcatctccaggaacaacacgagagacaactgtggtgcccaccagcttctctaccaagggtcccacccaaggatccatcccagaggggcaccatgaacattatgagccccagggcttgagtctcccagtgctgctgtccgtgttagctctcttgctgttgctgttggtggggacctctctgctggcctggaggatgttccagaagcggtcagtcaaagctgataagcacccagagatgtcccagaacctcagacaggccgaggagcagagtgaatcccagtatgtcaatctgcagctgcacacgttgcccctgagggaagagccggtgccaccaagtcaggtggaggtagaatacagcacactggcattacctcaggaagagctccattatacatccgtggtattcgactctcagaggcagaattctcatgccaatggggatcccccttgtcaatctccggaccaaaaaacagagtacagtgagatccggaagcccagagaaggtctctctgaccctcacccgtgactccttgtcatctgatcccttcaatggtgaccaccaggtccccaagctccctgctggctgctgccttcaatgtcgtgagcctccctggcttcactaaagatgagcaggagccagggctctgtgggtacagagtctcatccctgtggctctctcctcttagcctgcatttcgttctgcccctggttgtgaagatgtagatgctactcctttggggctctgggaagtgacatggttcatatagaatggcacttgtgtt

SEQ ID NO: 19 - protein, 300 aa, Homo sapiens
PMWLPWALLLLWVPGCFALSKCRTVAGPVGGSLSVQCPYEKEHRTLNKYWCRPPQIFLCDKIVETKGSAGKRNGRVSIRDSPANLSFTVTLENLTEEDAGTYWCGVDTPWLRDFHDPVVEVEVSVFPASTSMTPASITAAKTSTITTAFPPVSSTTLFAVGATHSASIQEETEEVVNSQLPLLLSLLALLLLLLVGASLLAWRMFQKWIKAGDHSELSQNPKQAATQSELHYANLELLMWPLQEKPAPPREVEVEYSTVASPREELHYASVVFDSNTNRIAAQRPREEEPDSDYSVIRKT

SEQ ID NO: 20 - protein, 104 aa, Homo sapiens
PMWLPWALLLLWVPAGDHSELSQNPKQAATQSELHYANLELLMWPLQEKPAPPREVEVEYSTVASPREELHYASVVFDSNTNRIAAQRPREEEPDSDYSVIRKT

SEQ ID NO: 21 - protein, 300 aa, Homo sapiens; identical to SEQ ID NO: 19

SEQ ID NO: 22 - protein, 187 aa, Homo sapiens
PMWLPWALLLLWVPASTSMTPASITAAKTSTITTAFPPVSSTTLFAVGATHSASIQEETEEVVNSQLPLLLSLLALLLLLLVGASLLAWRMFQKWIKAGDHSELSQNPKQAATQSELHYANLELLMWPLQEKPAPPREVEVEYSTVASPREELHYASVVFDSNTNRIAAQRPREEEPDSDYSVIRKT

SEQ ID NO: 23 - protein, 319 aa, Mus musculus
PMTQLASAVWLPTLLLLLLLFWLPGCVPLHGPSTMSGSVGESLSVSCRYEEKFKTKDKYWCRVSLKILCKDIVKTSSSEEARSGRVTIRDHPDNLTFTVTYESLTLEDADTYMCAVDISLFDGSLGFDKYFKIELSVVPSEDPVSSPGPTLETPVVSTSLPTKGPALGSNTEGHREHDYSQGLRLPALLSVLALLLFLLVGTSLLAWRMFQKRLVKADRHPELSQNLRQASEQNECQYVNLQLHTWSLREEPVLPSQVEVVEYSTLALPQEELHYSSVAFNSQRQDSHANGDSLHQPQDQKAEYSEIQKPRKGLSDLYL

SEQ ID NO: 24 - protein, 319 aa, Mus musculus
PMTQLASAVWLPTLLLLLLLFWLPGCVPLHGPSTMTGSVGQSLSVSCQYEEKFKTKDKYWCRVSLKILCKDIVKTSSSEEARSGRVTIRDHPDNLTFTVTYESLTLEDADTYMCAVDISLFDGSLGFDKYFKIELSVVPSEDPVSSPGPTLETPVVSTSLPTKGPALGSNTEGHREHDYSQGLRLPALLSVLALLLFLLVGTSLLAWRMFQKRLVKADRHPELSQNLRQASEQNECQYVNLQLHTWSLREEPVLPSQVEVVEYSTLALPQEELHYSSVAFNSQRQDSHANGDSLHQPQDQKAEYSEIQKPRKGLSDLYL

SEQ ID NO: 25 - protein, 315 aa, Mus musculus
PMTQLASAVWLPTLLLLLLLFWLPGCVPLHGPSTMTGSVGQSLSVSCQYEEKFKTKDKYWCRVSLKILCKDIVKTSSSEEARSGRVTIRDHPDNLTFTVTYESLTLEDADTYMCAVDISLFDGSLGFDKYFKIELSVVPSEDPGPTLETPVVSTSLPTKGPALGSNTEGHREHDYSQGLRLPALLSVLALLLFLLVGTSLLAWRMFQKRLVKADRHPELSQNLRQASEQNECQYVNLQLHTWSLREEPVLPSQVEVVEYSTLALPQEELHYSSVAFNSQRQDSHANGDSLHQPQDQKAEYSEIQKPRKGLSDLYL

SEQ ID NO: 26 - protein, 311 aa, Rattus novergicus
PMTQLASAVWPPTLLLLLLFWVPGCVPLRGPSSVTGTVGESLNVTCQYEERFKMNKKYWCRGSLVLLCKDIVRTGGSEEARNGRVSIRDDRDNLTFTVTLQNLTLEDAGTYMCAVDIPLIDHSFKVELSVVPGNIPVSSPGTTRETTVVPTSFSTKGPTQGSIPEGHHEHYEPQGLSLPVLLSVLALLLLLLVGTSLLAWRMFQKRSVKADKHPEMSQNLRQAEEQSESQYVNLQLHTLPLREEPVPPSQVEVEYSTLALPQEELHYTSVVFDSQRQNSHANGDPPCQSPDQKTEYSEIRKPREGLSDPHP

SEQ ID NO: 27 - DNA, 3195 bp, Homo sapiens
dggaaggtttaaagaagaagccgcaaagcgcagggaaggcctcccggcacgggtgggggaaagcggccggtgcagcgcggggacaggcactcgggctggcactggctgctagggatgtcgtcctggataaggtggcatggacccgccatggcgcggctctggggcttctgctggctggttgtgggcttctggagggccgctttcgcctgtcccacgtcctgcaaatgcagtgcctctcggatctggtgcagcgacccttctcctggcatcgtggcatttccgagattggagcctaacagtgtagatcctgagaacatcaccgaaattttcatcgcaaaccagaaaaggttagaaatcatcaacgaagatgatgttgaagcttatgtgggactgagaaatctgacaattgtggattctggattaaaatttgtggctcataaagcatttctgaaaaacagcaacctgcagcacatcaattttacccgaaacaaactgacgagtttgtctaggaaacatttccgtcaccttgacttgtctgaactgatcctggtgggcaatccatttacatgctcctgtgacattatgtggatcaagactctccaagaggctaaatccagtccagacactcaggatttgtactgcctgaatgaaagcagcaagaatattcccctggcaaacctgcagatacccaattgtggtttgccatctgcaaatctggccgcacctaacctcactgtggaggaaggaaagtctatcacattatcctgtagtgtggcaggtgatccggttcctaatatgtattgggatgttggtaacctggtttccaaacatatgaatgaaacaagccacacacagggctccttaaggataactaacatttcatccgatgacagtgggaagcagatctcttgtgtggcggaaaatcttgtaggagaagatcaagattctgtcaacctcactgtgcattttgcaccaactatcacatttctcgaatctccaacctcagaccaccactggtgcattccattcactgtgaaaggcaacccaaaaccagcgcttcagtggttctataacggggcaatattgaatgagtccaaatacatctgtactaaaatacatgttaccaatcacacggagtaccacggctgcctccagctggataatcccactcacatgaacaatggggactacactctaatagccaagaatgagtatgggaaggatgagaaacagatttctgctcacttcatgggctggcctggaattgacgatggtgcaaacccaaattatcctgatgtaatttatgaagattatggaactgcagcgaatgacatcggggacaccacgaacagaagtaatgaaatcccttccacagacgtcactgataaaaccggtcgggaacatctctcggtctatgctgtggtggtgattgcgtctgtggtgggattttgccttttggtaatgctgtttctgcttaagttggcaagacactccaagtttggcatgaaaggcccagcctccgttatcagcaatgatgatgactctgccagcccactccatcacatctccaatgggagtaacactccatcttcttcggaaggtggcccagatgctgtcattattggaatgaccaagatccctgtcattgaaaatccccagtactttggcatcaccaacagtcagctcaagccagacacatttgttcagcacatcaagcgacataacattgttctgaaaagggagctaggcgaaggagcctttggaaaagtgttcctagctgaatgctataacctctgtcctgagcaggacaagatcttggtggcagtgaagaccctgaaggatgccagtgacaatgcacgcaaggacttccaccgtgaggccgagctcctgaccaacctccagcatgagcacatcgtcaagttctatggcgtctgcgtggagggcgaccccctcatcatggtctttgagtacatgaagcatggggacctcaacaagttcctcagggcacacggccctgatgccgtgctgatggctgagggcaacccgcccacggaactgacgcagtcgcagatgctgcatatagcccagcagatcgccgcgggcatggtctacctggcgtcccagcacttcgtgcaccgcgatttggccaccaggaactgcctggtcggggagaacttgctggtgaaaatcggggactttgggatgtcccgggacgtgtacagcactgactactacagggtcggtggccacacaatgctgcccattcgctggatgcctccagagagcatcatgtacaggaaattcacgacggaaagcgacgtctggagcctgggggtcgtgttgtgggagattttcacctatggcaaacagccctggtaccagctgtcaaacaatgaggtgatagagtgtatcactcagggccgagtcctgcagcgaccccgcacgtgcccccaggaggtgtatgagctgatgctggggtgctggcagcgagagccccacatgaggaagaacatcaagggcatccataccctccttcagaacttggccaaggcatctccggtctacctggacattctaggctagggcccttttccccagaccgatccttcccaacgtactcctcagacgggctgagaggatgaacatcttttaactgccgctggaggccaccaagctgctctccttcactctgacagtattaacatcaaagactccgagaagctctcgagggaagcagtgtgtacttcttcatccatagacacagtattgacttctttttggcattatctctttctctctttccatctcccttggttgttcctttttctttttttaaattttctttttcttcttttttttcgtcttccctgcttcacgattcttaccctttcttttgaatcaatctggcttctgcattactattaactctgcatagacaaaggccttaacaaacgtaatttgttatatcagcagacactccagtttgcccaccacaactaacaatgccttgttgtattcctgcctttgatgtggatgaaaaaaagggaaaacaaatatttcacttaaactttgtcacttctgctgtacagatatcgagagtttctatggattcacttctatttatttattattattactgttcttattgtttttggatggcttaagcctgtgtataaaaaaaaaaaaaaatctaga

SEQ ID NO: 28 - DNA, 1871 bp, Homo sapiens
dggaaggtttaaagaagaagccgcaaagcgcagggaaggcctcccggcacgggtgggggaaagcggccggtgcagcgcggggacaggcactcgggctggcactggctgctagggatgtcgtcctggataaggtggcatggacccgccatggcgcggctctggggcttctgctggctggttgtgggcttctggagggccgctttcgcctgtcccacgtcctgcaaatgcagtgcctctcggatctggtgcagcgacccttctcctggcatcgtggcatttccgagattggagcctaacagtgtagatcctgagaacatcaccgaaattttcatcgcaaaccagaaaaggttagaaatcatcaacgaagatgatgttgaagcttatgtgggactgagaaatctgacaattgtggattctggattaaaatttgtggctcataaagcatttctgaaaaacagcaacctgcagcacatcaattttacccgaaacaaactgacgagtttgtctaggaaacatttccgtcaccttgacttgtctgaactgatcctggtgggcaatccatttacatgctcctgtgacattatgtggatcaagactctccaagaggctaaatccagtccagacactcaggatttgtactgcctgaatgaaagcagcaagaatattcccctggcaaacctgcagatacccaattgtggtttgccatctgcaaatctggccgcacctaacctcactgtggaggaaggaaagtctatcacattatcctgtagtgtggcaggtgatccggttcctaatatgtattgggatgttggtaacctggtttccaaacatatgaatgaaacaagccacacacagggctccttaaggataactaacatttcatccgatgacagtgggaagcagatctcttgtgtggcggaaaatcttgtaggagaagatcaagattctgtcaacctcactgtgcattttgcaccaactatcacatttctcgaatctccaacctcagaccaccactggtgcattccattcactgtgaaaggcaacccaaaaccagcgcttcagtggttctataacggggcaatattgaatgagtccaaatacatctgtactaaaatacatgttaccaatcacacggagtaccacggctgcctccagctggataatcccactcacatgaacaatggggactacactctaatagccaagaatgagtatgggaaggatgagaaacagatttctgctcacttcatgggctggcctggaattgacgatggtgcaaacccaaattatcctgatgtaatttatgaagattatggaactgcagcgaatgacatcggggacaccacgaacagaagtaatgaaatcccttccacagacgtcactgataaaaccggtcgggaacatctctcggtctatgctgtggtggtgattgcgtctgtggtgggattttgccttttggtaatgctgtttctgcttaagttggcaagacactccaagtttggcatgaaaggttttgttttgtttcataagatcccactggatgggtagctgaaataaaggaaaagacagagaaaggggctgtggtgcttgttggttgatgctgccatgtaagctggactcctgggactgctgttggcttatcccgggaagtgctgcttatctggggttttctggtagatgtgggcggtgtttggaggctgtactatatgaagcctgcatatactgtgagctgtgattggggaacaccaatgcagaggtaactctcaggcagctaagcagcacctcaagaaaacatgttaaattaatgcttctcttcttacagtagttcaaatacaaaactgaaatgaaatcccattggattgtacttctct

SEQ ID NO: 29 - DNA, 8745 bp, Mus musculus
dgtctggagggtgctatgctatgcgtgtgtgcgtgtgtgtgcgcgcgcgcgtgtgtgagcgtgtgtgtttttggatttcatactaattttctggagtttctgcccctgctctgcgtcagccctcacgtcacttcgccagcagtagcagaggcggcggcggcggcggccgccggttagagcccagtcgctgcttcagctgctgttgctgcttctgcagcgctctgctccctgcgcttgctacgggaggccggggaagccgcgcggacagtcctcggtggcctgggccggcactgtcctgctaccgcagttgctccccagccctgaggtgcgcaccgatatcgatattcgtgccggtttagcggttctgcgacccaaagagtccagggagatccaccgagtggtgcctggcgtataggactatgcagccgccttgtggctcggagcagcggcccgcgatgtcccagccactgtgaaccatttggtcagcgccaacctgctcagccccagcaccgacaggctcagcctctggtacgctccactccgcgggaggccaccagcaccaagcagcaagagggcgcagggaaggcctcccccctccggcgggggacgcctggctcagcgtagggacacgcactccgactgactggcactggcagctcgggatgtcgccctggctgaagtggcatggacccgccatggcgcggctctggggcttatgcctgctggtcttgggcttctggagggcctctctcgcctgcccgacgtcctgcaaatgcagttccgctaggatttggtgtactgagccttctccaggcatcgtggcattcccgaggttggaacctaacagcgttgacccggagaacatcacggaaattctcattgcaaaccagaaaaggctagaaatcatcaatgaagatgacgttgaagcttacgtggggctgagaaaccttacaattgtggattccggcttaaagtttgtggcttacaaagcgtttctgaaaaacagcaacctgcggcacataaatttcacacgaaacaagctgacgagtttgtccaggagacatttccgccaccttgacttgtctgacctgatcctgacgggtaatccgttcacgtgctcctgcgacatcatgtggctcaagactctccaggagactaaatccagccccgacactcaggatttgtactgcctcaatgagagcagcaagaacatgcccctggcgaacctgcagatacccaattgtggtctgccatctgcacgtctggctgctcctaacctcaccgtggaggaaggaaagtctgtgaccctttcctgcagtgtggggggtgacccactccccaccttgtactgggacgttgggaatttggtttccaagcacatgaatgaaacaagccacacacagggctccttaaggataacgaacatttcatctgatgacagtggaaagcaaatctcttgtgtggcagaaaaccttgtaggagaagatcaagattctgtgaacctcactgtgcattttgcgccaactatcacgtttctcgagtctccaacctcagatcaccactggtgcattccattcactgtgagaggcaaccccaagcctgcgcttcagtggttctacaatggggccatactgaatgagtccaagtacatctgtactaagatccacgtcaccaatcacacggagtaccatggctgcctccagctggataaccccactcatatgaataacggagactacaccctgatggccaagaacgagtatgggaaggatgagagacagatctccgctcacttcatgggccggcctggagtcgactacgagacaaacccaaattaccctgaagtcctctatgaagactggaccacgccaactgacattggggatactacgaacaaaagtaatgaaatcccctccacggatgttgctgaccaaagcaatcgggagcatctctcggtctatgccgtggtggtgattgcatctgtggtgggattctgcctgctggtgatgttgctcctgctcaagttggcgagacattccaagtttggcatgaaaggcccagcttcggtcatcagcaacgacgatgactctgccagccccctccaccacatctccaatgggagtaacactccatcttcttcggagggcggtcccgacgctgtcattattggaatgaccaagattcctgttattgaaaacccccagtactttggcatcaccaacagtcagctcaagccagacacatttgttcagcatatcaagagacacaacatcgttctgaagagggaacttggggaaggagccttcgggaaagttttccttgccgagtgctacaacctctgcccagagcaggataagatcctggtggctgtgaagacgctgaaggacgccagcgacaatgcacgcaaggactttcatcgggaagctgagctgctgaccaacctccagcacgagcacattgtcaagttctacggtgtctgtgtggagggcgacccactcatcatggtctttgagtacatgaagcacggggacctcaacaagttccttagggcacacgggcccgacgcagtgctgatggcagagggtaacccgcccacagagctgacgcagtcgcagatgctgcacatcgctcagcaaatcgcagcaggtatggtctacctggcgtcccaacactttgtgcaccgtgacctggccacccggaactgcctggtgggagagaacctgctggtgaaaattggggactttgggatgtcccgagatgtgtacagcaccgactactatcgggtcggtggccacacaatgttgcccatccgatggatgcctccagagagcatcatgtacaggaaattcaccaccgagagcgacgtctggagcctgggcgttgtgttgtgggagatcttcacctacggcaagcagccctggtatcagctatcgaacaatgaggtgatagagtgcatcacccagggaagagtccttcagcggcctcgaacgtgtccccaggaggtgtatgagctcatgcttggatgctggcagcgggaaccacacacccggaagaacatcaagagcatccacaccctccttcagaacttggccaaggcatctcccgtctacctggatatcctaggctagggtcctccttctgcccagaccgtccttcccaaggccctcctcagactggcctacacgacgaacctcttgactgccgctgacgtcatgaccttgctgtccttcgctctgacagtgttgacaggaccaggagcggctctttgggggaggcagtgtgtgcttctccatccacagacagtattaactcgcttctggcattgtctctttctctcccttgggtttgtttctttcttttgccccttccccttttatcattatttattcatttatttattttctggtcttcaccgcttcacggccctcagtctctccttgaccaatctggcttctgcattcctattaactgtacatagacaaaggccttaacaaacctaatttgttatatcagcagacactccagtttgcccaccacaactaacaatgccttgttgtattcctgcctttgacgtggatgaaaaaaagggaaaaaaaaatcaaacatctgacttaagctgtcacttccgatgtacagacgtggggcgtttctatggattcacttctatttattatttattaatttatttatttatcactcttcttattgttttctggtggttttaacctatgtgtgagaaggaaaagttgtgtacaatctgggaaaactttatcagtgggaaatgaaaacgagagcgagcaagcgagcaagagagggagagagagagagaagcgttaccataaaccacggcatgagcgagacagagacaagccatgggatcagtcgggagtccgttgtgcttaggaaaacccagcagccattagctgggggagcatgttcggctctgtcccccaagcacctttctgaggaggacacaggatgttgaactctgcttcacgggcagagcttctaatgacagatactggcttgcactggaaagacagttcccacgggacctggacggacaacacatcctacattcagacattgtggtcgggcacggtgacagagttgatccgtttctcaagtgttatctaccaagcttttgtgaagttccatcgaaggaggtagattcttgctcagatataatttcaggaaaacccgagtccttgacaaagacaggagacgctctcaatttggaggcaagtttctcttaccttgaactttttcagacagcaactccgcccagcccccatcttccactctcacctgtcttgtaactgtgcaaacaaaagtgtgcatggtctttgtcaattgatacctatgtgcacgtgtgcagaaactgttgttccagctggggtgtctgattaggagggcagatccataaaaggtctaacctaggcaacttcgggaaaggagaccagatcagtagctggaggcactctccagtaggcggtgaggggtttactgagtaggcatgctgaagcccggatattcacccatctcaaaccccccgggctgcaggacaggcacaggccatccctgaggagaaggggagcccttttgggataccacctgaggttatgttcagtgtgctctggtcaagtcccttgctcggggctctgtttggggagagtggtttcattccaaggtactcattattagtatgctgttttgttaactatactccattaaaaagttaaaaaaaaaaagaattaagccttgacactgtatggctgacaggaggctgtgcccagactgagcctggagatttgcgcccgcacatggtcattggttttccgaaaagagagggtaaatttatatagaaatttacaggtatttgggtagtcatttagaccgagggagaccagtgtttccatttctctgcgccccctctgtgaggggaagttcgatacacttgacacctttataaacggagccagataggaagggagtgacttaattcaccttagaacatttcatttggtgtttatttctgaaggtgcaagagctctgtgtaggtttcatttgtgcccgagcatttctggagcactgtgttttctagcagaaactccgagagccagttctcacaatgaaactttaaaacctgtgtaaattgacagagagcagaaggcgatccaagaggcccactcaagtgagtggtggcacgaggcacatgcggtggccctttctgttgtgctggcccatgagagatgggagctattttgtcctcttcgtccattaaaacaaacccctccagaatacctatagtaatataatgaaagccatatctctgtgatctataccgtcaggtatagatcattaaaggacccatggtactgtcaggcactgtggaaccgtgaggcagcggaaaggcaagggcacatttgtacatgttcctctagcttccgccagccgtgacctatgaactcacataggccggttgctcctagtctgacgggctgccctgggaggaaaagctgcaagatgctcagcagagagcaaaggagaggatagtcttggaaaaggccaaggttggggatgccatacaggattacaccaaagggctgtactgagaatgtgggagcattccattccaggtttgtattttcctcagcaagaaaaaagagcagatagaagggcagaggaggatagagaggaagagaaaggagagggagaagagagcagagaagagagagagagagagagagagagagaatctttatactttttggcaagtcctcgaaggtctcaaaatgaaagtgtctatgcaagtgcaaatttttacagttatttatactaattattattattgttattaattattattattactagtctgttgtctcaagaatatgtgcagatttcagagcattaaagagtatttggtttcttttaaagtagttgggtgagccaaggacaccttaaaataattgtcactgttcatctgctatcgcctttctcatggtattttaagttttagaaaagaaacattcttgttctaaaacatatccctctccatagatgacaaaaaaaaatggtgttagcaaaccgaaacctcccccgattcctgtctgacatccgatccatttctcaactgcttgatgatttccgagcgctttttgcatatgttgtcaaaatattcatattattttggtgagggaatggagactcagaaactcagaggacaaacataagcttcaccgaagtctgtctgccagatacaaactaacatacaaacaagacagccgggaaggaaatgtgctggtagcgtgtctgtggagcagggtgggggttagaacagaaggagacctgggcagtgcacgcagaagagatgttacatcatgtgcttctgctcctggcttctgctgactcccaactttgcgctcagcctcatttagaaaacgcttcaaacactgctcttcagggttctgtcagaactcacacacacgtgctcacaccagccccgcttgtgacgtttttatgtacttctatataaatatatacataatatatgttataaacacttgatttatacatatacaaatgcacacatgtagtgtgtttgtgtgtttatgtataaacatataggctcatggtaatagaataattataagtagggtgcaatatgaataatttgcttaatatttgctaagtaaccaaaactttccaacgtcatgtggcagttcatatttccactctcagtgtgggtaaggatgggctacaccacactttcagctctgtgcagcccttggatggaagatgtgttgaaaaaaaaatcacatcttccctgaaacaactgactgaaagccatcctctacattgaatctgttctctggctctttgcaaaggagaaatgcagacaaatggtctccttgtgtcccagtcctgggaaggagaagtgggttttctcttcttgcacatttgggccgtgctcacctttcctggctctatgccctttacactgggctcagagatgaagcagtctagacccaagctgcagggctgtagggaggcaaatgtcttcgaggctgatagcaaagcatccaaaaatctatagcaagatgcgcagcttgaagtcactcctcatccacacggcaagcaagagccagggcatgcagtgctgtccatctctaggactgggcagtggggtccccggtcaagggcagtctttccctaagcctctccttttgcaaatggcactgccagcagtacctggcattaagtcacgaaaaatttctaaaatggcagcacagacccgtgtgccctcattgctctgcccccacatgcctcatcattagagggctccagttttcaaacttgactttccatttggccctgtatcgtggttaaaggaaatctcaacagagggatggccaattgacctaaatccccagatgtccaagtttgcagtgaaagccagttcttcccaaatgtataactggaatgtagggactcaggttgtgatacttcatacaggaatctcagatgttattgtaaagaactgggttgggagggattcatcactaagccaacaataatgcaggagggcgtggctgatcgttaagccaatagtagtgcaggagggcgtggctgctgtgagggctggaatccatctctgctgctaaagttcagggttctcaactcttttcagctgttgcagcccttcacttctttcccttcggcgttatttatttgtgtatttatttatttatttatttatttatctatctatctatcaacttttggtccattcatcaccaacataaagcaaaaacaattttttacatatatgtaaatgtgttgcaagtgaaacactgtgaatctcacaaccacctcctagcaactatgctgccatcttgacgtgcgtctcaggagtcgagacgggaaaagacgaggacgtcattttgcagcctacgcattctgggccaggtccgtgttcgttttatttctttagtctgtgagttaagaaaacaatccgagtggagggtgacggatgttcggcaagttcggtgaagcagcacgagctctttgcagctataggttcgagcaagaagaaaaaccatgggagatggagaagggaaatttgatggaggggtggggtggggtgggggctctgtcttacagctcgtgtagcttactgttgcttaaaaatgtatacaacagctggaaatgttttcaacacaaggtatttgaaataaatgtgaatcttaaatatgtactcccttaaggaatgaacatattatggtgaaatattgctcccccgcgtcccctacaaatctgcctagagatgtggatacctacatttgcttaagcatcagaccagtgtttgtatatacccgggccatacacactcatctcgacgtctctctgcggatgtatttccccttcactggtgacctggtatttagaactccgtcttttcagttggtttatttccctttaatgtgatgtctctgtgccgattattaccggttcttacttgtttttgcaatccgttttgaggtccagtgttttactgagactcattgcatcttggctgatttcaaagtgacacccgaatacagtgtttaaaaaaaaagtttgtttgtaaatcatgtgaccagcttctctcaccctgacatggaatgtctcttgtactacagtgtatttaataataaaagaaaaaaatgatgtcttacaataaataacatcttccacaagagg

SEQ ID NO: 30 - DNA, 7050 bp, Mus musculus
dctaccagattcccttttaaatgactgcggatgtgcgggcggtcgcagctacaaatggtgagaggaggctcagatcaggctcgcgaatggcccgcagcgaccatttaactgcacccgcacgtttgtcactcgaccctccggaatcatctcacgtgtccccactgagactctagggcgctgccggagcccggcctctcggtagctggaagcacatcctgcctcgggcagcgcgggtgcagggtacacgttggcgcacatgcacgcgcgcacacgaacacgcgcaagccctgaggtgcgcaccgatatcgatattcgtgccggtttagcggttctgcgacccaaagagtccagggagatccaccgagtggtgcctggcgtataggactatgcagccgccttgtggctcggagcagcggcccgcgatgtcccagccactgtgaaccatttggtcagcgccaacctgctcagccccagcaccgacaggctcagcctctggtacgctccactccgcgggaggccaccagcaccaagcagcaagagggcgcagggaaggcctcccccctccggcgggggacgcctggctcagcgtagggacacgcactccgactgactggcactggcagctcgggatgtcgccctggctgaagtggcatggacccgccatggcgcggctctggggcttatgcctgctggtcttgggcttctggagggcctctctcgcctgcccgacgtcctgcaaatgcagttccgctaggatttggtgtactgagccttctccaggcatcgtggcattcccgaggttggaacctaacagcgttgacccggagaacatcacggaaattctcattgcaaaccagaaaaggctagaaatcatcaatgaagatgacgttgaagcttacgtggggctgagaaaccttacaattgtggattccggcttaaagtttgtggcttacaaagcgtttctgaaaaacagcaacctgcggcacataaatttcacacgaaacaagctgacgagtttgtccaggagacatttccgccaccttgacttgtctgacctgatcctgacgggtaatccgttcacgtgctcctgcgacatcatgtggctcaagactctccaggagactaaatccagccccgacactcaggatttgtactgcctcaatgagagcagcaagaacatgcccctggcgaacctgcagatacccaattgtggtctgccatctgcacgtctggctgctcctaacctcaccgtggaggaaggaaagtctgtgaccctttcctgcagtgtggggggtgacccactccccaccttgtactgggacgttgggaatttggtttccaagcacatgaatgaaacaagccacacacagggctccttaaggataacgaacatttcatctgatgacagtggaaagcaaatctcttgtgtggcagaaaaccttgtaggagaagatcaagattctgtgaacctcactgtgcattttgcgccaactatcacgtttctcgagtctccaacctcagatcaccactggtgcattccattcactgtgagaggcaaccccaagcctgcgcttcagtggttctacaatggggccatactgaatgagtccaagtacatctgtactaagatccacgtcaccaatcacacggagtaccatggctgcctccagctggataaccccactcatatgaataacggagactacaccctgatggccaagaacgagtatgggaaggatgagagacagatctccgctcacttcatgggccggcctggagtcgactacgagacaaacccaaattaccctgaagtcctctatgaagactggaccacgccaactgacattggggatactacgaacaaaagtaatgaaatcccctccacggatgttgctgaccaaagcaatcgggagcatctctcggtctatgccgtggtggtgattgcatctgtggtgggattctgcctgctggtgatgttgctcctgctcaagttggcgagacattccaagtttggcatgaaaggttttgttttgtttcataagatcccactggatgggtagctgagataaaggaaagacaaaggctggggctgtggtgcttgttgcctgacgccctgtgagctgaactctgggactgctgttgcctatcccaggaagtgctgcttatttgagggtgtctggtggaaatgggtaatctccgaggatgtctgcagcctgcttgttgtgagctgtgactggggaaccccaaggcagaggcaggggtcaggcagctgagaagcagcagaagaacacacttagattcaccttctgttcttacaatagttcaaatatagaatcgaagtgaaatctcattggattatgcctctctaatgaaaagcgagctgtttgactatacggaaaatgtgctgacattaattgcttctgtttattaaaggtgatttgcaaattaaaaactctgcatctatcatctatccatctatctgtttgtctatcatatctatctgtctgtctatctgtctatcatctatctacctacctctctatcatatctatctgtctgtctatctatctatctatctatctatctatctatctatctatctatctatctatcatctatctacctatcatcgatctacttatctatcatctatctatctacctatcatcgatttacttatctatcatctatctatctatctatctatctatctatctatttatctatctatctatctatctgtcatctatctaaagtcatagctaggtctaagtgcacactaaaagtctaatccacacataacacctatttcagcaacatcttctgttctctaacctttgctaacttctgtgatttccacctacaaccctgcgactgatagacttaaaggcacattggtggtgtcattagtaggttctttgttttgctggcagcaaagacccaaactcttcgctaacgattgctttcaaagtccacccggcaggtagaacggagcagcaccagggactgtgtggccaggagtatggacctgaattaaccacagcctgagaataaataatggtagggtatatgcatatagggaattaaaatcttgtccctttccattgccctctgctaaccacctgccctttagaggtttgcctagcgagagcacctcagatctcatgctgtttgaattacagagctgcagttctctagtgtgaataggcctgcaagctgagctgctggcctgctgtgagcgggagagcatgtctaaggacagtccctggagcatgctgccctactgctgcgtcctgacccagcagcagagaggtggccagctgctaatgaatgtgggctccttgctgaaagaacagtctcccagctaccaattcctgtagcccccaaccactccccacctgacccgtccctgtacccctctcattcactttgtcatggcagtggcctttgtgggatccatcccatctgcaccaggcagcaactttgtctgtccctccattctcacttgaggtccccttcagagccaggctgggatatttcatttaaaaaccacactcagctctattatacactcacacacagagcatagcttgagaggaaacttattaacattccttttttaaaaggtagtttatctttaaggatttttaggtttttctcttaacaatcccagcatgtttgggaactattttgaatcctctgtaagcatgtccatcaatcttaataaaccagaacccgtttaggccccacttgacatcaggggaatactgtagtattttatactgagccactacagtatggctcaattccggtctttttgtgagtccgtggattagagtgtttgcactggccaaccacattgtgcctgagagggccagtcacttccacagacctctcagaggctttgtctccaggtgcacagtgggtctcagcacagaaggctccgtgtcctgaacacccccactgcccagcactgcccccactgcagctaagtgacagctcctgtcaccactgagatctctgtctttcccaaaggtgttgacttacccagaggccagctaatagcagaaatcttgacccccgaaaggagagtgaaattcaaacaggcaggcaggccagggtctcagtgtgaccaacactcttaaatatcggccatttggcacccaaaaaaaccaacaaaacaaaacaaaaaacttaagctttgatgttattccataagaggatgatggattgtttaaagattattttataaggttcctcagatcagaaagaaaaaaaggggggggggaataatttcagttaacagctaggagaaatgtagggtaattttttttttgttctgagatgtaaagaagtggacagataaggagatttaatatcaaacgttacttggcatcttccaggggacaaggagagcagcggctattagaaaattgattcttatggttcctgtgttctttgtcttttcttctttataacccccaaggaccgccatcagcaacacagtattcctttcctatactcttccttttatccctggctttctttggtcccccagaagaaatctgctctctgaggattcacaatggtgtgtattttatttttacagtgccaggaagagagaagggacatttttatttttctggagttaggtctgtgctctctgacaggaactggcattacagtgccaggcaagtctccacactcacagtggtctaggtgagccagtacctgcctaaaacccaggggcaactgtcaggatgccaaccatgtcccgggggagcaaggacccaagcttccaaatcttattctctaaagaagatgtgaaacctggatttttatatgaaacctacctatttttaaaaagttggcacagttatttttaaaacattatgtaggccaacaaagcctgcctgtgggccgccagtctgttccttctgtcttagagagagtcattgttccccactgtatctgtctgtctttccctgcaaactctctttcttcatgactgccactgacaggtgcattaagcaagttctgacaggaacttcacccgtccaaaggtgcacagctgtctgttaccctgtgactccctcctagctgggaccccaggccctgtcaccttgctgggttgtccctacagtcctgtcttctcaacattctccaagtgcagagccatcctggtcctagtcagcactctcctccgctttatctgacacaaatcccttctctccaggtgccatgtcttctagactctcaagagagcagaatgagatgagatgagtcccgctcccccatctccatgctggcctcagtggactgatggccctacttagctacaaaacatcacctcaaagagatagggttccatagcttgttgacctgccatggttgggtctctggggcgtggttgggtcgctcaggcagctgagatggagtaacaaagagcttctgacaccacagcagccaacatagaaactgtcctaagactgaagagggctgtctcccagtaggagacatgaaccccagtacatattagagagaatcagctcagcagtcccccctcccacccctccagtctcaggcctccccacagccaagaaaaccagcgcattctgccttcatcttggccctctactcttcgggaccctgaaccaagctcacaatagctaggggtcttgaagcctgagcaggcttacacaggggtttgcagagtaagtgactgagagagtgtgcgactgaatgcagtttcaggggcatgctgagagaacaagcagggggcacttccttgcttctgctcccccccaccctctacccccatctttctaaactgaccccatgatagacagagaatgttgtctggttttgttggcagctctgcctaattataacacactgaactctccaccaccccttcttgcaaactagactctcaagcctgtgctgacttctgcctgtgagggggtgaaacacacctccacctgctttgatacatgctgtctagagtccctccctttgcttccatctcattctttcacactctaattgaaactcacttcatcttgtttggtctagactagagattcacggggagggctccgctgaagggggacgattccatacaacagggagctcaggaggtggctgcctccagctgtgtgggctgtgccaggctctctgctttatgatgacagagctcccgggatcctgtagctcagcagacctgactccaaggaacctggtacagaagttgccattaagaacattctgctccttttgcatacctcaatacttagcaatctgtcaagtttacctaagggcacctgggacagctgagggctctcctgaatttaaattgctttcgggtgagtgctgccaggcttaaattaggttgacagaattcccggcccagaaagtttgatagcagttttcacttgagaggcggcttcccagtgtggataactatttccttgtcctggtctcggggacagagggacctcccaagctactcgagcatgacataaatcattcactctgcatttagtctggactcacacttcagggtagccagtgatagtgaagcaactcccaaacccacactacaccccattgtctgtgttctgagtcttagtgttcttgggagggagaaaaacgtataagaagcaaggaaaagaaccggaatttttctcaccagcttaattttagccgatgcatatatgaactcacaaacaaataagaagtagcaagacattctcaagaaagatgtgtccctgggcttcatccctattgggtccaaacccatttgctggaatccagaggcagctcgtgactcacttttgtgccttttttcccctataatattctgggttttcaagtctcttttttcacatttcctgtaaacaatgcatctctttttttaaaaaagattttacttttaagtactgttttaacagtgtggctagactataaatgtacttgctgaattcatccatttctttaacaagccaataaagttttatgattcatctccaaaaaaaaaaaaaaaaaaaa

SEQ ID NO: 31 - DNA, 8712 bp, Mus musculus
dctaccagattcccttttaaatgactgcggatgtgcgggcggtcgcagctacaaatggtgagaggaggctcagatcaggctcgcgaatggcccgcagcgaccatttaactgcacccgcacgtttgtcactcgaccctccggaatcatctcacgtgtccccactgagactctagggcgctgccggagcccggcctctcggtagctggaagcacatcctgcctcgggcagcgcgggtgcagggtacacgttggcgcacatgcacgcgcgcacacgaacacgcgcaagccctgaggtgcgcaccgatatcgatattcgtgccggtttagcggttctgcgacccaaagagtccagggagatccaccgagtggtgcctggcgtataggactatgcagccgccttgtggctcggagcagcggcccgcgatgtcccagccactgtgaaccatttggtcagcgccaacctgctcagccccagcaccgacaggctcagcctctggtacgctccactccgcgggaggccaccagcaccaagcagcaagagggcgcagggaaggcctcccccctccggcgggggacgcctggctcagcgtagggacacgcactccgactgactggcactggcagctcgggatgtcgccctggctgaagtggcatggacccgccatggcgcggctctggggcttatgcctgctggtcttgggcttctggagggcctctctcgcctgcccgacgtcctgcaaatgcagttccgctaggatttggtgtactgagccttctccaggcatcgtggcattcccgaggttggaacctaacagcgttgacccggagaacatcacggaaattctcattgcaaaccagaaaaggctagaaatcatcaatgaagatgacgttgaagcttacgtggggctgagaaaccttacaattgtggattccggcttaaagtttgtggcttacaaagcgtttctgaaaaacagcaacctgcggcacataaatttcacacgaaacaagctgacgagtttgtccaggagacatttccgccaccttgacttgtctgacctgatcctgacgggtaatccgttcacgtgctcctgcgacatcatgtggctcaagactctccaggagactaaatccagccccgacactcaggatttgtactgcctcaatgagagcagcaagaacatgcccctggcgaacctgcagatacccaattgtggtctgccatctgcacgtctggctgctcctaacctcaccgtggaggaaggaaagtctgtgaccctttcctgcagtgtggggggtgacccactccccaccttgtactgggacgttgggaatttggtttccaagcacatgaatgaaacaagccacacacagggctccttaaggataacgaacatttcatctgatgacagtggaaagcaaatctcttgtgtggcagaaaaccttgtaggagaagatcaagattctgtgaacctcactgtgcattttgcgccaactatcacgtttctcgagtctccaacctcagatcaccactggtgcattccattcactgtgagaggcaaccccaagcctgcgcttcagtggttctacaatggggccatactgaatgagtccaagtacatctgtactaagatccacgtcaccaatcacacggagtaccatggctgcctccagctggataaccccactcatatgaataacggagactacaccctgatggccaagaacgagtatgggaaggatgagagacagatctccgctcacttcatgggccggcctggagtcgactacgagacaaacccaaattaccctgaagtcctctatgaagactggaccacgccaactgacattggggatactacgaacaaaagtaatgaaatcccctccacggatgttgctgaccaaagcaatcgggagcatctctcggtctatgccgtggtggtgattgcatctgtggtgggattctgcctgctggtgatgttgctcctgctcaagttggcgagacattccaagtttggcatgaaaggcccagcttcggtcatcagcaacgacgatgactctgccagccccctccaccacatctccaatgggagtaacactccatcttcttcggagggcggtcccgacgctgtcattattggaatgaccaagattcctgttattgaaaacccccagtactttggcatcaccaacagtcagctcaagccagacacatttgttcagcatatcaagagacacaacatcgttctgaagagggaacttggggaaggagccttcgggaaagttttccttgccgagtgctacaacctctgcccagagcaggataagatcctggtggctgtgaagacgctgaaggacgccagcgacaatgcacgcaaggactttcatcgggaagctgagctgctgaccaacctccagcacgagcacattgtcaagttctacggtgtctgtgtggagggcgacccactcatcatggtctttgagtacatgaagcacggggacctcaacaagttccttagggcacacgggcccgacgcagtgctgatggcagagggtaacccgcccacagagctgacgcagtcgcagatgctgcacatcgctcagcaaatcgcagcaggtatggtctacctggcgtcccaacactttgtgcaccgtgacctggccacccggaactgcctggtgggagagaacctgctggtgaaaattggggactttgggatgtcccgagatgtgtacagcaccgactactatcgggtcggtggccacacaatgttgcccatccgatggatgcctccagagagcatcatgtacaggaaattcaccaccgagagcgacgtctggagcctgggcgttgtgttgtgggagatcttcacctacggcaagcagccctggtatcagctatcgaacaatgaggtgatagagtgcatcacccagggaagagtccttcagcggcctcgaacgtgtccccaggaggtgtatgagctcatgcttggatgctggcagcgggaaccacacacccggaagaacatcaagagcatccacaccctccttcagaacttggccaaggcatctcccgtctacctggatatcctaggctagggtcctccttctgcccagaccgtccttcccaaggccctcctcagactggcctacacgacgaacctcttgactgccgctgacgtcatgaccttgctgtccttcgctctgacagtgttgacaggaccaggagcggctctttgggggaggcagtgtgtgcttctccatccacagacagtattaactcgcttctggcattgtctctttctctcccttgggtttgtttctttcttttgccccttccccttttatcattatttattcatttatttattttctggtcttcaccgcttcacggccctcagtctctccttgaccaatctggcttctgcattcctattaactgtacatagacaaaggccttaacaaacctaatttgttatatcagcagacactccagtttgcccaccacaactaacaatgccttgttgtattcctgcctttgacgtggatgaaaaaaagggaaaaaaaaatcaaacatctgacttaagctgtcacttccgatgtacagacgtggggcgtttctatggattcacttctatttattatttattaatttatttatttatcactcttcttattgttttctggtggttttaacctatgtgtgagaaggaaaagttgtgtacaatctgggaaaactttatcagtgggaaatgaaaacgagagcgagcaagcgagcaagagagggagagagagagagaagcgttaccataaaccacggcatgagcgagacagagacaagccatgggatcagtcgggagtccgttgtgcttaggaaaacccagcagccattagctgggggagcatgttcggctctgtcccccaagcacctttctgaggaggacacaggatgttgaactctgcttcacgggcagagcttctaatgacagatactggcttgcactggaaagacagttcccacgggacctggacggacaacacatcctacattcagacattgtggtcgggcacggtgacagagttgatccgtttctcaagtgttatctaccaagcttttgtgaagttccatcgaaggaggtagattcttgctcagatataatttcaggaaaacccgagtccttgacaaagacaggagacgctctcaatttggaggcaagtttctcttaccttgaactttttcagacagcaactccgcccagcccccatcttccactctcacctgtcttgtaactgtgcaaacaaaagtgtgcatggtctttgtcaattgatacctatgtgcacgtgtgcagaaactgttgttccagctggggtgtctgattaggagggcagatccataaaaggtctaacctaggcaacttcgggaaaggagaccagatcagtagctggaggcactctccagtaggcggtgaggggtttactgagtaggcatgctgaagcccggatattcacccatctcaaaccccccgggctgcaggacaggcacaggccatccctgaggagaaggggagcccttttgggataccacctgaggttatgttcagtgtgctctggtcaagtcccttgctcggggctctgtttggggagagtggtttcattccaaggtactcattattagtatgctgttttgttaactatactccattaaaaagttaaaaaaaaaaagaattaagccttgacactgtatggctgacaggaggctgtgcccagactgagcctggagatttgcgcccgcacatggtcattggttttccgaaaagagagggtaaatttatatagaaatttacaggtatttgggtagtcatttagaccgagggagaccagtgtttccatttctctgcgccccctctgtgaggggaagttcgatacacttgacacctttataaacggagccagataggaagggagtgacttaattcaccttagaacatttcatttggtgtttatttctgaaggtgcaagagctctgtgtaggtttcatttgtgcccgagcatttctggagcactgtgttttctagcagaaactccgagagccagttctcacaatgaaactttaaaacctgtgtaaattgacagagagcagaaggcgatccaagaggcccactcaagtgagtggtggcacgaggcacatgcggtggccctttctgttgtgctggcccatgagagatgggagctattttgtcctcttcgtccattaaaacaaacccctccagaatacctatagtaatataatgaaagccatatctctgtgatctataccgtcaggtatagatcattaaaggacccatggtactgtcaggcactgtggaaccgtgaggcagcggaaaggcaagggcacatttgtacatgttcctctagcttccgccagccgtgacctatgaactcacataggccggttgctcctagtctgacgggctgccctgggaggaaaagctgcaagatgctcagcagagagcaaaggagaggatagtcttggaaaaggccaaggttggggatgccatacaggattacaccaaagggctgtactgagaatgtgggagcattccattccaggtttgtattttcctcagcaagaaaaaagagcagatagaagggcagaggaggatagagaggaagagaaaggagagggagaagagagcagagaagagagagagagagagagagagagagaatctttatactttttggcaagtcctcgaaggtctcaaaatgaaagtgtctatgcaagtgcaaatttttacagttatttatactaattattattattgttattaattattattattactagtctgttgtctcaagaatatgtgcagatttcagagcattaaagagtatttggtttcttttaaagtagttgggtgagccaaggacaccttaaaataattgtcactgttcatctgctatcgcctttctcatggtattttaagttttagaaaagaaacattcttgttctaaaacatatccctctccatagatgacaaaaaaaaatggtgttagcaaaccgaaacctcccccgattcctgtctgacatccgatccatttctcaactgcttgatgatttccgagcgctttttgcatatgttgtcaaaatattcatattattttggtgagggaatggagactcagaaactcagaggacaaacataagcttcaccgaagtctgtctgccagatacaaactaacatacaaacaagacagccgggaaggaaatgtgctggtagcgtgtctgtggagcagggtgggggttagaacagaaggagacctgggcagtgcacgcagaagagatgttacatcatgtgcttctgctcctggcttctgctgactcccaactttgcgctcagcctcatttagaaaacgcttcaaacactgctcttcagggttctgtcagaactcacacacacgtgctcacaccagccccgcttgtgacgtttttatgtacttctatataaatatatacataatatatgttataaacacttgatttatacatatacaaatgcacacatgtagtgtgtttgtgtgtttatgtataaacatataggctcatggtaatagaataattataagtagggtgcaatatgaataatttgcttaatatttgctaagtaaccaaaactttccaacgtcatgtggcagttcatatttccactctcagtgtgggtaaggatgggctacaccacactttcagctctgtgcagcccttggatggaagatgtgttgaaaaaaaaatcacatcttccctgaaacaactgactgaaagccatcctctacattgaatctgttctctggctctttgcaaaggagaaatgcagacaaatggtctccttgtgtcccagtcctgggaaggagaagtgggttttctcttcttgcacatttgggccgtgctcacctttcctggctctatgccctttacactgggctcagagatgaagcagtctagacccaagctgcagggctgtagggaggcaaatgtcttcgaggctgatagcaaagcatccaaaaatctatagcaagatgcgcagcttgaagtcactcctcatccacacggcaagcaagagccagggcatgcagtgctgtccatctctaggactgggcagtggggtccccggtcaagggcagtctttccctaagcctctccttttgcaaatggcactgccagcagtacctggcattaagtcacgaaaaatttctaaaatggcagcacagacccgtgtgccctcattgctctgcccccacatgcctcatcattagagggctccagttttcaaacttgactttccatttggccctgtatcgtggttaaaggaaatctcaacagagggatggccaattgacctaaatccccagatgtccaagtttgcagtgaaagccagttcttcccaaatgtataactggaatgtagggactcaggttgtgatacttcatacaggaatctcagatgttattgtaaagaactgggttgggagggattcatcactaagccaacaataatgcaggagggcgtggctgatcgttaagccaatagtagtgcaggagggcgtggctgctgtgagggctggaatccatctctgctgctaaagttcagggttctcaactcttttcagctgttgcagcccttcacttctttcccttcggcgttatttatttgtgtatttatttatttatttatttatttatctatctatctatcaacttttggtccattcatcaccaacataaagcaaaaacaattttttacatatatgtaaatgtgttgcaagtgaaacactgtgaatctcacaaccacctcctagcaactatgctgccatcttgacgtgcgtctcaggagtcgagacgggaaaagacgaggacgtcattttgcagcctacgcattctgggccaggtccgtgttcgttttatttctttagtctgtgagttaagaaaacaatccgagtggagggtgacggatgttcggcaagttcggtgaagcagcacgagctctttgcagctataggttcgagcaagaagaaaaaccatgggagatggagaagggaaatttgatggaggggtggggtggggtgggggctctgtcttacagctcgtgtagcttactgttgcttaaaaatgtatacaacagctggaaatgttttcaacacaaggtatttgaaataaatgtgaatcttaaatatgtactcccttaaggaatgaacatattatggtgaaatattgctcccccgcgtcccctacaaatctgcctagagatgtggatacctacatttgcttaagcatcagaccagtgtttgtatatacccgggccatacacactcatctcgacgtctctctgcggatgtatttccccttcactggtgacctggtatttagaactccgtcttttcagttggtttatttccctttaatgtgatgtctctgtgccgattattaccggttcttacttgtttttgcaatccgttttgaggtccagtgttttactgagactcattgcatcttggctgatttcaaagtgacacccgaatacagtgtttaaaaaaaaagtttgtttgtaaatcatgtgaccagcttctctcaccctgacatggaatgtctcttgtactacagtgtatttaataataaaagaaaaaaatgatgtcttacaataaataacatcttccacaagagg

SEQ ID NO: 32 - DNA, 4758 bp, Rattus novergicus
datctgtgtgcgagtgcgtgtgcgtgcgtgtgtgtgtgtgtgtgtgtgtgtgtgtgtgtgtgtgtgagcgtgtgtgtttttggatttcatactaattttctggagtttctgcccctgctctgcgtcagccctcacgtcacttcgccagcagtagcagaggcggcggcggccgccggttagagcccagtcgctgcttcagctgctgttgctgcttctgcggcgctctgctccctgcgctggctacgggaggccgggggagccgcgccgacagtcctctgtggccagggccggcactgtcctgctaccgcagttgctccccagccctgaggtgcgcaccgatatcgatatccgtgccggtttagcggttctgcgacccaaagagtccagggagagccaccgagtggcgcctggcgtataggaccatgcagccgccttgtggcttggagcagcggcccgtgatgttccagccactgtgaaccatttggtcagcgccaacctgctcagccccagcaccgacaggctcagcctctggtacgctcctctcggcgggaggccatcagcaccaagcagcaagagggctcagggaaggcctcccccctccggcgggggacgcctggctcagcgtagggacacgcactctgactgactggcactggcagctcgggatgtcgccctggccgaggtggcatggacccgccatggcgcggctctggggcttatgcttgctggtcttgggcttctggagggcttctcttgcctgccccatgtcctgcaaatgcagcaccactaggatttggtgtaccgagccttctcctggcatcgtggcatttccgaggttggaacctaacagcattgacccagagaacatcaccgaaattctcattgcaaaccagaaaaggttagaaatcatcaatgaagatgatgtcgaagcttacgtggggctgaaaaaccttacaattgtggattccggcttaaagtttgtggcttacaaggcgtttctgaagaacggcaacctgcggcacatcaatttcactcgaaacaagctgacgagtttgtccaggagacatttccgccaccttgacttgtctgacctgatcctgacgggtaatccgttcacgtgttcctgtgacatcatgtggctcaagactctccaggagacgaaatccagccccgacactcaggatttgtattgcctcaatgagagcagcaagaatacccctctggcgaacctgcagattcccaattgtggtctgccgtctgcacgtctggccgctcctaacctcacggtggaggaagggaagtctgtgaccatttcctgcagcgtcgggggtgacccgctccccaccttgtactgggacgttgggaatttggtttccaaacacatgaatgaaacaagccacacacagggctccttaaggataacaaacatttcatcggatgacagtgggaaacaaatctcttgtgtggcagaaaacctcgtcggagaagatcaagactctgtgaacctcactgtgcattttgcaccaaccatcacatttctcgaatctccaacctcagaccaccactggtgcatcccattcactgtgagaggcaaccccaagccagcacttcagtggttctacaacggagccatactgaatgaatccaagtacatctgtaccaaaatacacgtcaccaatcacacggagtaccacggctgcctccagctggataaccccactcatatgaataatggagactacaccctaatggccaagaatgaatatgggaaggacgagagacagatttctgctcacttcatgggccggcctggagttgactatgagacaaacccaaattaccctgaagtcctctatgaagactggaccacgccaactgacatcggggatactacaaacaaaagtaatgagatcccctccacggatgttgctgaccaaaccaatcgggagcatctctcggtctatgctgtggtggtgattgcctctgtggtaggattctgcctgctggtgatgctgcttctgctcaagttggcgagacattccaagtttggcatgaaaggcccagcttccgtcatcagcaacgacgatgactctgccagccctctccaccacatctccaacgggagcaacactccgtcttcttcggagggcgggcccgatgctgtcatcattgggatgaccaagatccctgtcattgaaaacccccagtacttcggtatcaccaacagccagctcaagccggacacatttgttcagcacatcaagagacacaacatcgttctgaagagggagcttggagaaggagcctttgggaaagttttcctagcggagtgctataacctctgccccgagcaggataagatcctggtggccgtgaagacgctgaaggacgccagcgacaatgctcgcaaggactttcatcgcgaagccgagctgctgaccaacctccagcacgagcacattgtcaagttctacggtgtctgtgtggagggcgacccactcatcatggtctttgagtacatgaagcacggggacctcaacaagttccttagggcacacgggccagatgcagtgctgatggcagagggtaacccgcccaccgagctgacgcagtcgcagatgctgcacatcgctcagcaaatcgcagcaggcatggtctacctggcatcccaacacttcgtgcaccgagacctggccacccggaactgcttggtaggagagaacctgctggtgaaaattggggacttcgggatgtcccgggatgtatacagcaccgactactaccgggttggtggccacacaatgttgcccatccgatggatgcctccagagagcatcatgtacaggaaattcaccaccgagagtgacgtctggagcctgggagttgtgttgtgggagatcttcacctacggcaagcagccctggtatcagctatcaaacaacgaggtgatagaatgcatcacccagggcagagtccttcagcggcctcgcacgtgtccccaggaggtgtacgagctgatgctgggatgctggcagcgggaaccacacacaaggaagaacatcaagaacatccacacactccttcagaacttggcgaaggcgtcgcccgtctacctggacatcctaggctagactccctcttctcccagacggcccttcccaaggcacccctcagacctcttaactgccgctgatgtcaccaccttgctgtccttcgctctgacagtgttaacaagacaaggagcggctctccggggtgaggcagtgcgcacttccccatccacagacagtatcgactcgcttctggctttgtcgctttctctccctttggtttgtttctttcttttgcccattctccatttatttatttatttatttatttatttatttatttatttatttatttatctatctatctatctatttatttatttatttattggtcttcactgcttcatggtcctcggcctctctccttgaccgatctggcttctgtactcctattcactgtacatagacaaaggccttaacaaacctgatttgttatatcagcagacactccagtttgcccaccacaactaacaatgccttgttgtattcctgcctttgatgtggatgaaaaaaagggaaaaaaaataatcaaacatctgacttaaaccgtcacttccgatgtacagacacggggcgtttctatggattcacttctatctatctatttatttatttatctatttatttatttctcttctttgttgttttccggtggttttagcctgtgtatgagaagggaaagtcatgtacagtctgggaaaactttatctgtgggaaatggaaaccagaaggggaaagaagctttaccataaagcacagcaggagtgagacacagaaaagccattggatcagccagagtccgtcctgcataggaaaacccagcagccatcaggctggaggatcatgttcggcactgacccccgaggacctttctgaggaggacacagaatgttaaactctgcatcatggacacagtttccgatcacagatactggccttcaatggaaaaaaaaaaaaaaaaaacccagatagttcttgtgagacctggacagcacgtccaacatccagacattgtggtcgggcacagtgacagagttgatgcatttctcacgggttattctacagagcttttgtcaagtccaatggaaggaggtagattcttgttcagatatgatttcgggaaaaaccgagtccttgacaaagacaggagacaccctcagttgggaggcaagtttctcttaccttggactttctcacacagcaattctcacccccaccccctccactctcacctgtcttgtaactgtgcaaacaaaagtgtgcatggtctttgtcagttgatacctttgtgcacctctgtgcagaaactgctgtctgtcccggctgtggtacccgatcagtggggtagatccacgaaaggtctcattttaggccgctttgggaaggtaaccagatcggtagctggaagcactctccagtaggtggcgaagggtgagtgggtctgctgaagcctgcatatcttcacccacctcaaacccaccgggctgcacaggggacaggcacaggccacccctgagggacagggaagctctcttgggataccacctgagtttacattcagtgtgctcaggtcaagtctctcgctcggggctctgtttcggggagaatggtttcattccaacgcactcattatcaggattctgttttc

SEQ ID NO: 33 - DNA, 4751 bp, Rattus novergicus
dtgtgcgtgcgtgcgtgtgtgtgtgtgtgtgtgtgtgtgtgtgtgtgtgtgtgtgtgtgtgtgagcgtgtgtgtttttggatttcatactaattttctggagtttctgcccctgctctgcgtcagccctcacgtcacttcgccagcagtagcagaggcggcggcggccgccggttagagcccagtcgctgcttcagctgctgttgctgcttctgcggcgctctgctccctgcgctggctacgggaggccgggggagccgcgccgacagtcctctgtggccagggccggcactgtcctgctaccgcagttgctccccagccctgaggtgcgcaccgatatcgatatccgtgccggtttagcggttctgcgacccaaagagtccagggagagccaccgagtggcgcctggcgtataggaccatgcagccgccttgtggcttggagcagcggcccgtgatgttccagccactgtgaaccatttggtcagcgccaacctgctcagccccagcaccgacaggctcagcctctggtacgctcctctcggcgggaggccatcagcaccaagcagcaagagggctcagggaaggcctcccccctccggcgggggacgcctggctcagcgtagggacacgcactctgactgactggcactggcagctcgggatgtcgccctggccgaggtggcatggacccgccatggcgcggctctggggcttatgcttgctggtcttgggcttctggagggcttctcttgcctgccccatgtcctgcaaatgcagcaccactaggatttggtgtaccgagccttctcctggcatcgtggcatttccgaggttggaacctaacagcattgacccagagaacatcaccgaaattctcattgcaaaccagaaaaggttagaaatcatcaatgaagatgatgtcgaagcttacgtggggctgaaaaaccttacaattgtggattccggcttaaagtttgtggcttacaaggcgtttctgaagaacggcaacctgcggcacatcaatttcactcgaaacaagctgacgagtttgtccaggagacatttccgccaccttgacttgtctgacctgatcctgacgggtaatccgttcacgtgttcctgtgacatcatgtggctcaagactctccaggagacgaaatccagccccgacactcaggatttgtattgcctcaatgagagcagcaagaatacccctctggcgaacctgcagattcccaattgtggtctgccgtctgcacgtctggccgctcctaacctcacggtggaggaagggaagtctgtgaccatttcctgcagcgtcgggggtgacccgctccccaccttgtactgggacgttgggaatttggtttccaaacacatgaatgaaacaagccacacacagggctccttaaggataacaaacatttcatcggatgacagtgggaaacaaatctcttgtgtggcagaaaacctcgttggagaagatcaagactctgtgaacctcactgtgcattttgcaccaaccatcacatttctcgaatctccaacctcagaccaccactggtgcatcccattcactgtgagaggcaaccccaagccagcacttcagtggttctacaacggagccatactgaatgaatccaagtacatctgtaccaaaatacacgtcaccaatcacacggagtaccacggctgcctccagctggataaccccactcatatgaataatggagactacaccctaatggccaagaatgaatatgggaaggacgagagacagatttctgctcacttcatgggccggcctggagttgactatgagacaaacccaaattaccctgaagtcctctatgaagactggaccacgccaactgacatcggggatactacaaacaaaagtaatgagatcccctccacggatgttgctgaccaaaccaatcgggagcatctctcggtctatgccgtggtggtgattgcctctgtggtaggattctgcctgctggtgatgctgcttctgctcaagttggcgagacattccaagtttggcatgaaaggcccagcttccgtcatcagcaacgacgatgactctgccagccctctccaccacatctccaacgggagcaacactccgtcttcttcggagggcgggcccgatgctgtcatcattgggatgaccaagatccctgtcattgaaaacccccagtacttcggtatcaccaacagccagctcaagccggacacatttgttcagcacatcaagagacacaacatcgttctgaagagggagcttggagaaggagcctttgggaaagttttcctagcggagtgctataacctctgccccgagcaggataagatcctggtggccgtgaagacgctgaaggacgccagcgacaatgctcgcaaggactttcatcgcgaagccgagctgctgaccaacctccagcacgagcacattgtcaagttctacggtgtctgtgtggagggcgacccactcatcatggtctttgagtacatgaagcacggggacctcaacaagttccttagggcacacgggccagatgcagtgctgatggcagagggtaacccgcccaccgagctgacgcagtcgcagatgctgcacatcgctcagcaaatcgcagcaggcatggtctacctggcatcccaacacttcgtgcaccgagacctggccacccggaactgcttggtaggagagaacctgctggtgaaaattggggacttcgggatgtcccgggatgtatacagcaccgactactaccgggttggtggccacacaatgttgcccatccgatggatgcctccagagagcatcatgtacaggaaattcaccaccgagagtgacgtctggagcctgggagttgtgttgtgggagatcttcacctacggcaagcagccctggtatcagctatcaaacaacgaggtgatagaatgcatcacccagggcagagtccttcagcggcctcgcacgtgtccccaggaggtgtacgagctgatgctgggatgctggcagcgggaaccacacacaaggaagaacatcaagaacatccacacactccttcagaacttggcgaaggcgtcgcccgtctacctggacatcctaggctagactccctcttctcccagacggcccttcccaaggcacccctcagacctcttaactgccgctgatgtcaccaccttgctgtccttcgctctgacagtgttaacaagacaaggagcggctctccggggtgaggcagtgcgcacttccccatccacagacagtatcgactcgcttctggctttgtcgctttctctccctttggtttgtttctttcttttgcccattctccatttatttatttatttatttatttatttatttatttatttatctatctatctatctatctatctatctatttatttatttattggtcttcactgcttcatggtcctcggcctctctccttgaccgatctggcttctgtactcctattcactgtacatagacaaaggccttaacaaacctgatttgttatatcagcagacactccagtttgcccaccacaactaacaatgccttgttgtattcctgcctttgatgtggatgaaaaaaagggaaaaaaaaataatcaaacatctgacttaaaccgtcacttccgatgtacagacacggggcgtttctatggattcacttctatctatctatttatttatttatctatttatttatttctcttctttgttgttttccggtggttttagcctgtgtatgagaagggaaagtcatgtacagtctgggaaaactttatctgtgggaaatggaaaccagaaagggaaagaagctttaccataaagcacagcaggagtgagacacagaaaagccattggatcagccagagtccgtcctgcataggaaaacccagcagccatcaggctggaggatcatgttcggcactgacccccgaggacctttctgaggaggacacagaatgttaaactctgcatcatggacacagtttccgatcacagatactggccttcaatggaaaaaaaaaaaaacccagatagttcttgtgagacctggacagcacgtccaacatccagacattgtggtcgggcacagtgacagagttgatgcatttctcacgggttattctacagagcttttgtcaagtccaatggaaggaggtagattcttgttcagatatgatttcgggaaaaaccgagtccttgacaaagacaggagacaccctcagttgggaggcaagtttctcttaccttggactttctcacacagcaattctcacccccaccccctccactctcacctgtcttgtaactgtgcaaacaaaagtgtgcatggtctttgtcagttgatacctttgtgcacctctgtgcagaaactgctgtctgtcccggctgtggtacccgatcagtggggtagatccacgaaaggtctcattttaggccgctttgggaaggtaaccagatcggtagctggaagcactctccagtaggtggcgaagggtgagtgggtctgctgaagcctgcatatcttcacccacctcaaacccaccgggctgcacaggggacaggcacaggccacccctgagggacagggaagctctcttgggataccacctgagtttacattcagtgtgctcaggtcaagtctctcgctcggggctctgtttcggggagaatggtttcattccaacgcactcattatcaggattctgttttc

SEQ ID NO: 34 - DNA, 6932 bp, Rattus novergicus
dctgtgtgcgagtgcgtgtgcgtgcgtgcgtgtgtgtgtgtgtgtgtgtgtgtgtgtgtgtgtgtgtgtgtgtgtgtgagcgtgtgtgtttttggatttcatactaattttctggagtttctgcccctgctctgcgtcagccctcacgtcacttcgccagcagtagcagaggcggcggcggccgccggttagagcccagtcgctgcttcagctgctgttgctgcttctgcggcgctctgctccctgcgctggctacgggaggccgggggagccgcgccgacagtcctctgtggccagggccggcactgtcctgctaccgcagttgctccccagccctgaggtgcgcaccgatatcgatatccgtgccggtttagcggttctgcgacccaaagagtccagggagagccaccgagtggcgcctggcgtataggaccatgcagccgccttgtggcttggagcagcggcccgtgatgttccagccactgtgaaccatttggtcagcgccaacctgctcagccccagcaccgacaggctcagcctctggtacgctcctctcggcgggaggccatcagcaccaagcagcaagagggctcagggaaggcctcccccctccggcgggggacgcctggctcagcgtagggacacgcactctgactgactggcactggcagctcgggatgtcgccctggccgaggtggcatggacccgccatggcgcggctctggggcttatgcttgctggtcttgggcttctggagggcttctcttgcctgccccatgtcctgcaaatgcagcaccactaggatttggtgtaccgagccttctcctggcatcgtggcatttccgaggttggaacctaacagcattgacccagagaacatcaccgaaattctcattgcaaaccagaaaaggttagaaatcatcaatgaagatgatgtcgaagcttacgtggggctgaaaaaccttacaattgtggattccggcttaaagtttgtggcttacaaggcgtttctgaagaacggcaacctgcggcacatcaatttcactcgaaacaagctgacgagtttgtccaggagacatttccgccaccttgacttgtctgacctgatcctgacgggtaatccgttcacgtgttcctgtgacatcatgtggctcaagactctccaggagacgaaatccagccccgacactcaggatttgtattgcctcaatgagagcagcaagaatacccctctggcgaacctgcagattcccaattgtggtctgccgtctgcacgtctggccgctcctaacctcacggtggaggaagggaagtctgtgaccatttcctgcagcgtcgggggtgacccgctccccaccttgtactgggacgttgggaatttggtttccaaacacatgaatgaaacaagccacacacagggctccttaaggataacaaacatttcatcggatgacagtgggaaacaaatctcttgtgtggcagaaaacctcgttggagaagatcaagactctgtgaacctcactgtgcattttgcaccaaccatcacatttctcgaatctccaacctcagaccaccactggtgcatcccattcactgtgagaggcaaccccaagccagcacttcagtggttctacaacggagccatactgaatgaatccaagtacatctgtaccaaaatacacgtcaccaatcacacggagtaccacggctgcctccagctggataaccccactcatatgaataatggagactacaccctaatggccaagaatgaatatgggaaggacgagagacagatttctgctcacttcatgggccggcctggagttgactatgagacaaacccaaattaccctgaagtcctctatgaagactggaccacgccaactgacatcggggatactacaaacaaaagtaatgagatcccctccacggatgttgctgaccaaaccaatcgggagcatctctcggtctatgccgtggtggtgattgcctctgtggtaggattctgcctgctggtgatgctgcttctgctcaagttggcgagacattccaagtttggcatgaaaggttttgttttgtttcataagatccccctggatgggtagctgagataaaggaaagacaaggctggggctgtgctgcttggtgcttggcgccccgtgagctgaactcctgggactactgttgcctatcccaggaagtgctgcttatttgggggtgtctggtggaaatgggtgttctccaaagatgtccgcagcctgcttgttgtgagctgtgactggggaaccccaaggcagaggcaggggtcaggcagctgagaagcagcagaagaacacacttagattcatcttctgttcttacaatagctcaaatatagaatcaaagtgaaatctcattggattgtgcctctctaatgaaaaatgtgctgtttgactatatgggaaatgtgctgacattaattgcttctgtttattaaaggtgatttgcaaattaaaaactatgcacctatcatctatcatctatctattatctatctatctatctatctatctatctatctatctacctatctatctgtctatcatctatctaaagtcgtagctaggtcttagcacacactaaaagtctaacccacacataacaaccatttcagcaacattttctgttctctaacccatgctgacgtctgcgattccacctacaacctaacgactaacagagccaagggcacatttgtggtgccatttctaggttctttgttttgctggcagcgaagacccaaactcttaccttaagtgtcagggcacataaagctaacggttgctttaaagtctgtgcggcaggtaggatggagccgcaccaaggactgtgtggccaggagtgtggacttgaaccaaccacgctctgagaataaccagtggtagggcttatgcatatagggaattaaaatcttgacccttcccattgctctctgggaaccacctgccctttagaactttgcctagcaagaagggcctcacatctcatgctgtttgaattacagagctgcagtttctccagtgtgaataggcctgcaagctgagctcctggctggctgtgagcaggagagcagtctaaagatagtccctggagcatgctgccctaccgctgtgtcctgacccagcagcaaagaggttgcgggcagctaataaatatgtgctttatagcgtcccttttcctcgctgggagcacggcctccccgctagcaatccccatggcccccaaccactccccacttgattctgacccgagcccctctctctcgttcactttgtcatggcctttgtgggatctgtcctatccgcaccaagtggcaactttgtccattccctcaccctcccttgaggtccccttcacagccaggctgggatatttcatttaaaaaccacacagctctgtcacacctagagcatagctagagtggaaacttattaacattcctttctgaaaaggtagtttatctttagggatttataggtttttctcttaacagtcccagcgtgtttgggaactagttcgaatactccgtaaagcaggttcatcaatcttaataaaccagaacccatttaggcctcgcttgacagaaggcaaatactgtagtatttttgtaaggctgtggatcatagtgtttgcgttggccatccactctgtgcctgagagggccagtcacttccactgacctctcagaggctttgtctccgggtgcacggtgggtctcagcacagagggctcccggtcctgaacacccccactgcccagtttgctgcagctaagtgacagctcctgtcactactgagatttctgtctttcccaaaggtgttgacttaccaagaggccagctaatagcagaaatcttgacccctgaaaggaaaatgacattcaaactgccagccagccaggggctcagtgtggcaaacactcttaagtattggccatttgacaccaaaggaaaaaaaaaaagaaaaagaaaaagaaaaaatcccccaaaacaaaacaaacaaacaaaaaaaccccaacccctccaacaatttaagcttctattttgttccatggagccacaagaggattacggattatttaaagattattttataaatttctcagaccagagagaaagaaagaaaaagggcagtgaccccagttaacagtgagaagaaatgtagggtaatctttttattttgagatataaagaggtggacagataaggagatttagcatccaatgccaccgggcatcttccagggacagagagcacagcgggctattagaaagttgtttctcatggctcctgttttctttgcctttccttttatttttttaagcccccaggactgccgtcagcaacacggcttttctttcccatggtcttcctattatccttggctttctttgatcccccccagaagaaatctgctctttgaggattcacaatggcgtgaattttacttttacagcttcaggaagggagaagggagactccttttttccgctggagttaggtctgtggatctctgacaggaattggcactgctgtgccaggcaagtctcctacacacacagtggtctaggtgagccagcacctgcctaaaccccaggagcagctgtcaggcagccaaccttgtcccctgtcccaggggatgaggacccacgtctccgaatcttattctctaaggaatatgtggaacctggatttcttacatgaaatattcctatttttaaaaagttggcacagttatttttaaaacattatgtaggccaacaaagcctgcctgtgggccgccagtctgttccttctgtcttagagagagccattgttcccccactgtatctgtctgtctttccctgcgaactctcctcgttccctctgcctaccactgacagctgcacttaagcaagttctgaatgaacttcaacagcctgaagattccggactgtctgttaccctgtgactcccacctagctgggacctcaggccctgtcaccttgatggcttgttcttacagtcttgtcttctctccattctccaagcacagagctattctggatcctagtaaatactttcctctgttctttcccttctctccaagctccatgtcttctggactctttagagagcagaacgagatgaaaaaagtcccccctgtctcatcttcatggtgtccttagtaggctgatgaccctgggtagttagaaaacatcacctcaaagagatatagttccttggcttgttgacccactgtggttgggtctctgaggctctctcaggcagctgagatggagtgagaaacaccttctgacaccacaagatatcagccaacatacagacagtcctaaggctgaagacggctgtctcccagtaggagacatggaccccagtatgtgttaggatcagttcaacagttccacttcccacgtctccagtctcaacagccccccacccccatacccagcaaagagaaccagcacattcttcttcatctcggccctctcctcttcagggccctggactaagctcaaaatggctagtcttgaagcttacacagcggcttgcagagtaactggccgagagagagcaggtgaccgaaatgcagcttcagggcatgctggatgcaggacaagagcccagggcagggcgcttacttactcctgctcccttccccctcccccagctctctaaaccgaccccatgactgagaatgagaccctatgagaccgagaaggttttccgattttgctggccgctttgcctaattataacacactcagcttctttctccctctcgcaaactagaatctcaagcccgtgctgacttctccccgtgagggggtgattcacacctccacctgctttgatgcatgctgtctagaatccctccctctgcttcgatctcattcgttcacactctaattgaaacccacttcctcttgtttggtctagactggagattcacggggagggctctgttgaaggggagctattccatacaacagggagctctggaggtggcttcctccagctgtgtgggctgcaccagcccctctgctttgtgatgacagagctcctgggatcctgtagctcagcagatctgactgcaaggaacttggagcagaagttgccactgagaacattctgcccctctcgctcgcccgcatccctcagtactcagcagtctgtcaagtttacctaagggcacctgggacagcccaggactctccctaatttaaattgctttggggcggatgctgccaggcttcagttaagttgacagaattcccagcccagaaagttatctggcagtttctacttgagaggcagcttcccagtgcggataaccatttccccgttctggtctcagggacaaagggacctcccagctattcgagcacggcatagatcattcccctcacacgtctagtctggactcacgcttcaggctacccagcgatagggaggcaactcccaaccccacaatacagaccactctgtgttcagagtcttcgcttccatggggggagaaaaaggtacaagaagcaaagaaccagaatcctctcaccagcttaagttagccaatgcatcggtgaactcacaaatatgaagtagccagaaattctcaagaaagacacatccccgggtttcatccctgtcgggtccaaatccatctgctggaatccaggggcagctcatgactcacttttgtgcctttttccccctataatattctgggttttcaagtctctttttccacatttcctgtaaacaatgcatccttccctctctttttaaagagattttacttttaagtgctgttttaacaatgtggctagactataaatgtacttgctgaattcatccatttctttaacaagccaataaagttttataattcatc

SEQ ID NO: 35 - protein, 823 aa, Homo sapiens
PMSSWIRWHGPAMARLWGFCWLVVGFWRAAFACPTSCKCSASRIWCSDPSPGIVAFPRLEPNSVDPENITEIFIANQKRLEIINEDDVEAYVGLRNLTIVDSGLKFVAHKAFLKNSNLQHINFTRNKLTSLSRKHFRHLDLSELILVGNPFTCSCDIMWIKTLQEAKSSPDTQDLYCLNESSKNIPLANLQIPNCGLPSANLAAPNLTVEEGKSITLSCSVAGDPVPNMYWDVGNLVSKHMNETSHTQGSLRITNISSDDSGKQISCVAENLVGEDQDSVNLTVHFAPTITFLESPTSDHHWCIPFTVKGNPKPALQWFYNGAILNESKYICTKIHVTNHTEYHGCLQLDNPTHMNNGDYTLIAKNEYGKDEKQISAHFMGWPGIDDGANPNYPDVIYEDYGTAANDIGDTTNRSNEIPSTDVTDKTGREHLSVYAVVVIASVVGFCLLVMLFLLKLARHSKFGMKGPASVISNDDDSASPLHHISNGSNTPSSSEGGPDAVIIGMTKIPVIENPQYFGITNSQLKPDTFVQHIKRHNIVLKRELGEGAFGKVFLAECYNLCPEQDKILVAVKTLKDASDNARKDFHREAELLTNLQHEHIVKFYGVCVEGDPLIMVFEYMKHGDLNKFLRAHGPDAVLMAEGNPPTELTQSQMLHIAQQIAAGMVYLASQHFVHRDLATRNCLVGENLLVKIGDFGMSRDVYSTDYYRVGGHTMLPIRWMPPESIMYRKFTTESDVWSLGVVLWEIFTYGKQPWYQLSNNEVIECITQGRVLQRPRTCPQEVYELMLGCWQREPHMRKNIKGIHTLLQNLAKASPVYLDILG

SEQ ID NO: 36 - protein, 478 aa, Homo sapiens
PMSSWIRWHGPAMARLWGFCWLVVGFWRAAFACPTSCKCSASRIWCSDPSPGIVAFPRLEPNSVDPENITEIFIANQKRLEIINEDDVEAYVGLRNLTIVDSGLKFVAHKAFLKNSNLQHINFTRNKLTSLSRKHFRHLDLSELILVGNPFTCSCDIMWIKTLQEAKSSPDTQDLYCLNESSKNIPLANLQIPNCGLPSANLAAPNLTVEEGKSITLSCSVAGDPVPNMYWDVGNLVSKHMNETSHTQGSLRITNISSDDSGKQISCVAENLVGEDQDSVNLTVHFAPTITFLESPTSDHHWCIPFTVKGNPKPALQWFYNGAILNESKYICTKIHVTNHTEYHGCLQLDNPTHMNNGDYTLIAKNEYGKDEKQISAHFMGWPGIDDGANPNYPDVIYEDYGTAANDIGDTTNRSNEIPSTDVTDKTGREHLSVYAVVVIASVVGFCLLVMLFLLKLARHSKFGMKGFVLFHKIPLDG

SEQ ID NO: 37 - protein, 477 aa, Mus musculus
PMSPWLKWHGPAMARLWGLCLLVLGFWRASLACPTSCKCSSARIWCTEPSPGIVAFPRLEPNSVDPENITEILIANQKRLEIINEDDVEAYVGLRNLTIVDSGLKFVAYKAFLKNSNLRHINFTRNKLTSLSRRHFRHLDLSDLILTGNPFTCSCDIMWLKTLQETKSSPDTQDLYCLNESSKNMPLANLQIPNCGLPSARLAAPNLTVEEGKSVTLSCSVGGDPLPTLYWDVGNLVSKHMNETSHTQGSLRITNISSDDSGKQISCVAENLVGEDQDSVNLTVHFAPTITFLESPTSDHHWCIPFTVRGNPKPALQWFYNGAILNESKYICTKIHVTNHTEYHGCLQLDNPTHMNNGDYTLMAKNEYGKDERQISAHFMGRPGVDYETNPNYPEVLYEDWTTPTDIGDTTNKSNEIPSTDVADQSNREHLSVYAVVVIASVVGFCLLVMLLLLKLARHSKFGMKGFVLFHKIPLDG

SEQ ID NO: 38 - protein, 822 aa, Mus musculus
PMSPWLKWHGPAMARLWGLCLLVLGFWRASLACPTSCKCSSARIWCTEPSPGIVAFPRLEPNSVDPENITEILIANQKRLEIINEDDVEAYVGLRNLTIVDSGLKFVAYKAFLKNSNLRHINFTRNKLTSLSRRHFRHLDLSDLILTGNPFTCSCDIMWLKTLQETKSSPDTQDLYCLNESSKNMPLANLQIPNCGLPSARLAAPNLTVEEGKSVTLSCSVGGDPLPTLYWDVGNLVSKHMNETSHTQGSLRITNISSDDSGKQISCVAENLVGEDQDSVNLTVHFAPTITFLESPTSDHHWCIPFTVRGNPKPALQWFYNGAILNESKYICTKIHVTNHTEYHGCLQLDNPTHMNNGDYTLMAKNEYGKDERQISAHFMGRPGVDYETNPNYPEVLYEDWTTPTDIGDTTNKSNEIPSTDVADQSNREHLSVYAVVVIASVVGFCLLVMLLLLKLARHSKFGMKGPASVISNDDDSASPLHHISNGSNTPSSSEGGPDAVIIGMTKIPVIENPQYFGITNSQLKPDTFVQHIKRHNIVLKRELGEGAFGKVFLAECYNLCPEQDKILVAVKTLKDASDNARKDFHREAELLTNLQHEHIVKFYGVCVEGDPLIMVFEYMKHGDLNKFLRAHGPDAVLMAEGNPPTELTQSQMLHIAQQIAAGMVYLASQHFVHRDLATRNCLVGENLLVKIGDFGMSRDVYSTDYYRVGGHTMLPIRWMPPESIMYRKFTTESDVWSLGVVLWEIFTYGKQPWYQLSNNEVIECITQGRVLQRPRTCPQEVYELMLGCWQREPHTRKNIKSIHTLLQNLAKASPVYLDILG

SEQ ID NO: 39 - protein, 477 aa, Mus musculus; identical to SEQ ID NO: 37

SEQ ID NO: 40 - protein, 822 aa, Rattus novergicus
PMSPWPRWHGPAMARLWGLCLLVLGFWRASLACPMSCKCSTTRIWCTEPSPGIVAFPRLEPNSIDPENITEILIANQKRLEIINEDDVEAYVGLKNLTIVDSGLKFVAYKAFLKNGNLRHINFTRNKLTSLSRRHFRHLDLSDLILTGNPFTCSCDIMWLKTLQETKSSPDTQDLYCLNESSKNTPLANLQIPNCGLPSARLAAPNLTVEEGKSVTISCSVGGDPLPTLYWDVGNLVSKHMNETSHTQGSLRITNISSDDSGKQISCVAENLVGEDQDSVNLTVHFAPTITFLESPTSDHHWCIPFTVRGNPKPALQWFYNGAILNESKYICTKIHVTNHTEYHGCLQLDNPTHMNNGDYTLMAKNEYGKDERQISAHFMGRPGVDYETNPNYPEVLYEDWTTPTDIGDTTNKSNEIPSTDVADQTNREHLSVYAVVVIASVVGFCLLVMLLLLKLARHSKFGMKGPASVISNDDDSASPLHHISNGSNTPSSSEGGPDAVIIGMTKIPVIENPQYFGITNSQLKPDTFVQHIKRHNIVLKRELGEGAFGKVFLAECYNLCPEQDKILVAVKTLKDASDNARKDFHREAELLTNLQHEHIVKFYGVCVEGDPLIMVFEYMKHGDLNKFLRAHGPDAVLMAEGNPPTELTQSQMLHIAQQIAAGMVYLASQHFVHRDLATRNCLVGENLLVKIGDFGMSRDVYSTDYYRVGGHTMLPIRWMPPESIMYRKFTTESDVWSLGVVLWEIFTYGKQPWYQLSNNEVIECITQGRVLQRPRTCPQEVYELMLGCWQREPHTRKNIKNIHTLLQNLAKASPVYLDILG

SEQ ID NO: 41 - protein, 477 aa, Rattus novergicus
PMSPWPRWHGPAMARLWGLCLLVLGFWRASLACPMSCKCSTTRIWCTEPSPGIVAFPRLEPNSIDPENITEILIANQKRLEIINEDDVEAYVGLKNLTIVDSGLKFVAYKAFLKNGNLRHINFTRNKLTSLSRRHFRHLDLSDLILTGNPFTCSCDIMWLKTLQETKSSPDTQDLYCLNESSKNTPLANLQIPNCGLPSARLAAPNLTVEEGKSVTISCSVGGDPLPTLYWDVGNLVSKHMNETSHTQGSLRITNISSDDSGKQISCVAENLVGEDQDSVNLTVHFAPTITFLESPTSDHHWCIPFTVRGNPKPALQWFYNGAILNESKYICTKIHVTNHTEYHGCLQLDNPTHMNNGDYTLMAKNEYGKDERQISAHFMGRPGVDYETNPNYPEVLYEDWTTPTDIGDTTNKSNEIPSTDVADQTNREHLSVYAVVVIASVVGFCLLVMLLLLKLARHSKFGMKGFVLFHKIPLDG

SEQ ID NO: 42 - DNA, 4756 bp, Homo sapiens
dcacacacacacacacacacagagagaacatctctagtaaaaagaaaagttgagctttcttagctagatgtgtgtattagccagaaaaagccaaggagtgaagggttttagagaactggaggagataaagtggagtctgcatatgggaggcatttgaaatggacttaaatgtctttttaatgctgactttttcagttttctccttaccagacacattgttttcatgacattagccccaggcatagacacatcattaaaatgaacatgtcaaaaaatgatttctgtttagaaataagcaaaacattttcagttgtgaccacccaggtgtagaataaagaacagtggaattgggagccctgagttctaacataaactttcttcatgacataaggcaagtcttctatggcctttggtttccttacctgtaaaacaggatggctcaatgaaattatctttcttctttgctataatagagtatctctgtgggaagaggaaaaaaaaagtcaatttaaaggctccttatagttccccaactgctgttttattgtgctattcatgcctagacatcacatagctagaaaggcccatcagacccctcaggccactgctgttcctgtcacacattcctgcaaaggaccatgttgctaacttgaaaaaaattactattaattacacttgcagttgttgcttagtaacatttatgattttgtgtttctcgtgacagcatgagcagagatcattaaaaattaaacttacaaagctgctaaagtgggaagaaggagaacttgaagccacaatttttgcacttgcttagaagccatctaatctcaggttatatgctagatcttgggggcaaacactgcatgtctctggtttatattaaaccacatacagcacactactgacactgatttgtgtctggtgcagctggagtttatcaccaagacataaaaaaaccttgaccctgcagaatggcctggaattacaatcagatgggccacatggcatcccggtgaaagaaagccctaaccagttttctgtcttgtttctgctttctccctacagttccaccaggtgagaagagtgatgaccatccttttccttactatggttatttcatactttggttgcatgaaggctgcccccatgaaagaagcaaacatccgaggacaaggtggcttggcctacccaggtgtgcggacccatgggactctggagagcgtgaatgggcccaaggcaggttcaagaggcttgacatcattggctgacactttcgaacacgtgatagaagagctgttggatgaggaccagaaagttcggcccaatgaagaaaacaataaggacgcagacttgtacacgtccagggtgatgctcagtagtcaagtgcctttggagcctcctcttctctttctgctggaggaatacaaaaattacctagatgctgcaaacatgtccatgagggtccggcgccactctgaccctgcccgccgaggggagctgagcgtgtgtgacagtattagtgagtgggtaacggcggcagacaaaaagactgcagtggacatgtcgggcgggacggtcacagtccttgaaaaggtccctgtatcaaaaggccaactgaagcaatacttctacgagaccaagtgcaatcccatgggttacacaaaagaaggctgcaggggcatagacaaaaggcattggaactcccagtgccgaactacccagtcgtacgtgcgggcccttaccatggatagcaaaaagagaattggctggcgattcataaggatagacacttcttgtgtatgtacattgaccattaaaaggggaagatagtggatttatgttgtatagattagattatattgagacaaaaattatctatttgtatatatacataacagggtaaattattcagttaagaaaaaaataattttatgaactgcatgtataaatgaagtttatacagtacagtggttctacaatctatttattggacatgtccatgaccagaagggaaacagtcatttgcgcacaacttaaaaagtctgcattacattccttgataatgttgtggtttgttgccgttgccaagaactgaaaacataaaaagttaaaaaaaataataaattgcatgctgctttaattgtgaattgataataaactgtcctctttcagaaaacagaaaaaaacacacacacacacaacaaaaatttgaaccaaaacattccgtttacattttagacagtaagtatcttcgttcttgttagtactatatctgttttactgcttttaacttctgatagcgttggaattaaaacaatgtcaaggtgctgttgtcattgctttactggcttaggggatgggggatggggggtatatttttgtttgttttgtgtttttttttcgtttgtttgttttgttttttagttcccacagggagtagagatggggaaagaattcctacaatatatattctggctgataaaagatacatttgtatgttgtgaagatgtttgcaatatcgatcagatgactagaaagtgaataaaaattaaggcaactgaacaaaaaaatgctcacactccacatcccgtgatgcacctcccaggccccgctcattctttgggcgttggtcagagtaagctgcttttgacggaaggacctatgtttgctcagaacacattctttccccccctccccctctggtctcctctttgttttgttttaaggaagaaaaatcagttgcgcgttctgaaatattttaccactgctgtgaacaagtgaacacattgtgtcacatcatgacactcgtataagcatggagaacagtgatttttttttagaacagaaaacaacaaaaaataaccccaaaatgaagattattttttatgaggagtgaacatttgggtaaatcatggctaagcttaaaaaaaactcatggtgaggcttaacaatgtcttgtaagcaaaaggtagagccctgtatcaacccagaaacacctagatcagaacaggaatccacattgccagtgacatgagactgaacagccaaatggaggctatgtggagttggcattgcatttaccggcagtgcgggaggaatttctgagtggccatcccaaggtctaggtggaggtggggcatggtatttgagacattccaaaacgaaggcctctgaaggacccttcagaggtggctctggaatgacatgtgtcaagctgcttggacctcgtgctttaagtgcctacattatctaactgtgctcaagaggttctcgactggaggaccacactcaagccgacttatgcccaccatcccacctctggataattttgcataaaattggattagcctggagcaggttgggagccaaatgtggcatttgtgatcatgagattgatgcaatgagatagaagatgtttgctacctgaacacttattgctttgaaactagacttgaggaaaccagggtttatcttttgagaacttttggtaagggaaaagggaacaggaaaagaaaccccaaactcaggccgaatgatcaaggggacccataggaaatcttgtccagagacaagacttcgggaaggtgtctggacattcagaacaccaagacttgaaggtgccttgctcaatggaagaggccaggacagagctgacaaaattttgctccccagtgaaggccacagcaaccttctgcccatcctgtctgttcatggagagggtccctgcctcacctctgccattttgggttaggagaagtcaagttgggagcctgaaatagtggttcttggaaaaatggatccccagtgaaaactagagctctaagcccattcagcccatttcacacctgaaaatgttagtgatcaccacttggaccagcatccttaagtatcagaaagccccaagcaattgctgcatcttagtagggtgagggataagcaaaagaggatgttcaccataacccaggaatgaagataccatcagcaaagaatttcaatttgttcagtctttcatttagagctagtctttcacagtaccatctgaatacctctttgaaagaaggaagactttacgtagtgtagatttgttttgtgttgtttgaaaatattatctttgtaattatttttaatatgtaaggaatgcttggaatatctgctatatgtcaactttatgcagcttccttttgagggacaaatttaaaacaaacaaccccccatcacaaacttaaaggattgcaagggccagatctgttaagtggtttcataggagacacatccagcaattgtgtggtcagtggctcttttacccaataagatacatcacagtcacatgcttgatggtttatgttgacctaagatttattttgttaaaatctctctctgttgtgttcgttcttgttctgttttgttttgttttttaaagtcttgctgtggtctctttgtggcagaagtgtttcatgcatggcagcaggcctgttgcttttttatggcgattcccattgaaaatgtaagtaaatgtctgtggccttgttctctctatggtaaagatattattcaccatgtaaaacaaaaaacaatatttattgtattttagtatatttatataattatgttattgaaaaaaattggcattaaaacttaaccgcatcagaacctattgtaaatacaagttctatttaagtgtactaattaacatataatatatgttttaaatatagaatttttaatgtttttaaatatattttcaaagtacataaaa

SEQ ID NO: 43 - DNA, 4126 bp, Homo sapiens
daatatcaagtatcacttaattagagatttttaagccttttcctcctgctgtgccgggtgtgtaatccgggcgataggagtccattcagcaccttggacagagccaacggatttgtccgaggtggcggtacccccaggtagtcttcttggccccgctgtaaagccaaccctgtgtcgcccttaaaaagcgtcttttctgaggttcggctcacactgagatcggggctggagagagagtcagattttggagcggagcgtttggaaagcgagccccagtttggtcccctcattgagctcgctgaagttggcttcctagcggtgtaggctggaatagactcttggcaagctccgggttggtatactgggttaactttgggaaatgcaagtgtttatctccaggatctagccaccggggtggtgtaagccgcaaagaagttccaccaggtgagaagagtgatgaccatccttttccttactatggttatttcatactttggttgcatgaaggctgcccccatgaaagaagcaaacatccgaggacaaggtggcttggcctacccaggtgtgcggacccatgggactctggagagcgtgaatgggcccaaggcaggttcaagaggcttgacatcattggctgacactttcgaacacgtgatagaagagctgttggatgaggaccagaaagttcggcccaatgaagaaaacaataaggacgcagacttgtacacgtccagggtgatgctcagtagtcaagtgcctttggagcctcctcttctctttctgctggaggaatacaaaaattacctagatgctgcaaacatgtccatgagggtccggcgccactctgaccctgcccgccgaggggagctgagcgtgtgtgacagtattagtgagtgggtaacggcggcagacaaaaagactgcagtggacatgtcgggcgggacggtcacagtccttgaaaaggtccctgtatcaaaaggccaactgaagcaatacttctacgagaccaagtgcaatcccatgggttacacaaaagaaggctgcaggggcatagacaaaaggcattggaactcccagtgccgaactacccagtcgtacgtgcgggcccttaccatggatagcaaaaagagaattggctggcgattcataaggatagacacttcttgtgtatgtacattgaccattaaaaggggaagatagtggatttatgttgtatagattagattatattgagacaaaaattatctatttgtatatatacataacagggtaaattattcagttaagaaaaaaataattttatgaactgcatgtataaatgaagtttatacagtacagtggttctacaatctatttattggacatgtccatgaccagaagggaaacagtcatttgcgcacaacttaaaaagtctgcattacattccttgataatgttgtggtttgttgccgttgccaagaactgaaaacataaaaagttaaaaaaaataataaattgcatgctgctttaattgtgaattgataataaactgtcctctttcagaaaacagaaaaaaacacacacacacacaacaaaaatttgaaccaaaacattccgtttacattttagacagtaagtatcttcgttcttgttagtactatatctgttttactgcttttaacttctgatagcgttggaattaaaacaatgtcaaggtgctgttgtcattgctttactggcttaggggatgggggatggggggtatatttttgtttgttttgtgtttttttttcgtttgtttgttttgttttttagttcccacagggagtagagatggggaaagaattcctacaatatatattctggctgataaaagatacatttgtatgttgtgaagatgtttgcaatatcgatcagatgactagaaagtgaataaaaattaaggcaactgaacaaaaaaatgctcacactccacatcccgtgatgcacctcccaggccccgctcattctttgggcgttggtcagagtaagctgcttttgacggaaggacctatgtttgctcagaacacattctttccccccctccccctctggtctcctctttgttttgttttaaggaagaaaaatcagttgcgcgttctgaaatattttaccactgctgtgaacaagtgaacacattgtgtcacatcatgacactcgtataagcatggagaacagtgatttttttttagaacagaaaacaacaaaaaataaccccaaaatgaagattattttttatgaggagtgaacatttgggtaaatcatggctaagcttaaaaaaaactcatggtgaggcttaacaatgtcttgtaagcaaaaggtagagccctgtatcaacccagaaacacctagatcagaacaggaatccacattgccagtgacatgagactgaacagccaaatggaggctatgtggagttggcattgcatttaccggcagtgcgggaggaatttctgagtggccatcccaaggtctaggtggaggtggggcatggtatttgagacattccaaaacgaaggcctctgaaggacccttcagaggtggctctggaatgacatgtgtcaagctgcttggacctcgtgctttaagtgcctacattatctaactgtgctcaagaggttctcgactggaggaccacactcaagccgacttatgcccaccatcccacctctggataattttgcataaaattggattagcctggagcaggttgggagccaaatgtggcatttgtgatcatgagattgatgcaatgagatagaagatgtttgctacctgaacacttattgctttgaaactagacttgaggaaaccagggtttatcttttgagaacttttggtaagggaaaagggaacaggaaaagaaaccccaaactcaggccgaatgatcaaggggacccataggaaatcttgtccagagacaagacttcgggaaggtgtctggacattcagaacaccaagacttgaaggtgccttgctcaatggaagaggccaggacagagctgacaaaattttgctccccagtgaaggccacagcaaccttctgcccatcctgtctgttcatggagagggtccctgcctcacctctgccattttgggttaggagaagtcaagttgggagcctgaaatagtggttcttggaaaaatggatccccagtgaaaactagagctctaagcccattcagcccatttcacacctgaaaatgttagtgatcaccacttggaccagcatccttaagtatcagaaagccccaagcaattgctgcatcttagtagggtgagggataagcaaaagaggatgttcaccataacccaggaatgaagataccatcagcaaagaatttcaatttgttcagtctttcatttagagctagtctttcacagtaccatctgaatacctctttgaaagaaggaagactttacgtagtgtagatttgttttgtgttgtttgaaaatattatctttgtaattatttttaatatgtaaggaatgcttggaatatctgctatatgtcaactttatgcagcttccttttgagggacaaatttaaaacaaacaaccccccatcacaaacttaaaggattgcaagggccagatctgttaagtggtttcataggagacacatccagcaattgtgtggtcagtggctcttttacccaataagatacatcacagtcacatgcttgatggtttatgttgacctaagatttattttgttaaaatctctctctgttgtgttcgttcttgttctgttttgttttgttttttaaagtcttgctgtggtctctttgtggcagaagtgtttcatgcatggcagcaggcctgttgcttttttatggcgattcccattgaaaatgtaagtaaatgtctgtggccttgttctctctatggtaaagatattattcaccatgtaaaacaaaaaacaatatttattgtattttagtatatttatataattatgttattgaaaaaaattggcattaaaacttaaccgcatcagaacctattgtaaatacaagttctatttaagtgtactaattaacatataatatatgttttaaatatagaatttttaatgtttttaaatatattttcaaagtacataaaa

SEQ ID NO: 44 - DNA, 4339 bp, Homo sapiens
dattattaaagcggtagtctgccggcgctgataagcaacaagttccccagcggtcttcccgccctagcctgacaaggcgaaggttttcttacctggcgacagggaaatctcccgagccgaattcagcttcgccggagccccaggtgtgacctgcgtagtgggcaagggagcggtgtgcaggctgagtttttttttttacaggggtaccctgaaactcctcactttctctgggaactttcagtgccaggacccagtaacgggcggttagaaggcagccctaggaaacacctgctacatagcagggcagttgggcaatcattggtaacctcgctcattcattagaatcacgtaagaactcaaaaggaaacgtgtctctcggagtgagggcgtttgcgtaaatctataggtttttcgacatcgatgccagttgctttgtcttctgtagtcgccaaggtggttgagagtttaagcttgcggatattgcaaagggttattagattcataagtcacaccaagtggtgggcgatccactgagcaaagccgaacttctcacatgatgacttcaaacaagacacattaccttccagcatctgttggggagacgagattttaagacacttgagtctccaggacagcaaaggcacaatgttccaccaggtgagaagagtgatgaccatccttttccttactatggttatttcatactttggttgcatgaaggctgcccccatgaaagaagcaaacatccgaggacaaggtggcttggcctacccaggtgtgcggacccatgggactctggagagcgtgaatgggcccaaggcaggttcaagaggcttgacatcattggctgacactttcgaacacgtgatagaagagctgttggatgaggaccagaaagttcggcccaatgaagaaaacaataaggacgcagacttgtacacgtccagggtgatgctcagtagtcaagtgcctttggagcctcctcttctctttctgctggaggaatacaaaaattacctagatgctgcaaacatgtccatgagggtccggcgccactctgaccctgcccgccgaggggagctgagcgtgtgtgacagtattagtgagtgggtaacggcggcagacaaaaagactgcagtggacatgtcgggcgggacggtcacagtccttgaaaaggtccctgtatcaaaaggccaactgaagcaatacttctacgagaccaagtgcaatcccatgggttacacaaaagaaggctgcaggggcatagacaaaaggcattggaactcccagtgccgaactacccagtcgtacgtgcgggcccttaccatggatagcaaaaagagaattggctggcgattcataaggatagacacttcttgtgtatgtacattgaccattaaaaggggaagatagtggatttatgttgtatagattagattatattgagacaaaaattatctatttgtatatatacataacagggtaaattattcagttaagaaaaaaataattttatgaactgcatgtataaatgaagtttatacagtacagtggttctacaatctatttattggacatgtccatgaccagaagggaaacagtcatttgcgcacaacttaaaaagtctgcattacattccttgataatgttgtggtttgttgccgttgccaagaactgaaaacataaaaagttaaaaaaaataataaattgcatgctgctttaattgtgaattgataataaactgtcctctttcagaaaacagaaaaaaacacacacacacacaacaaaaatttgaaccaaaacattccgtttacattttagacagtaagtatcttcgttcttgttagtactatatctgttttactgcttttaacttctgatagcgttggaattaaaacaatgtcaaggtgctgttgtcattgctttactggcttaggggatgggggatggggggtatatttttgtttgttttgtgtttttttttcgtttgtttgttttgttttttagttcccacagggagtagagatggggaaagaattcctacaatatatattctggctgataaaagatacatttgtatgttgtgaagatgtttgcaatatcgatcagatgactagaaagtgaataaaaattaaggcaactgaacaaaaaaatgctcacactccacatcccgtgatgcacctcccaggccccgctcattctttgggcgttggtcagagtaagctgcttttgacggaaggacctatgtttgctcagaacacattctttccccccctccccctctggtctcctctttgttttgttttaaggaagaaaaatcagttgcgcgttctgaaatattttaccactgctgtgaacaagtgaacacattgtgtcacatcatgacactcgtataagcatggagaacagtgatttttttttagaacagaaaacaacaaaaaataaccccaaaatgaagattattttttatgaggagtgaacatttgggtaaatcatggctaagcttaaaaaaaactcatggtgaggcttaacaatgtcttgtaagcaaaaggtagagccctgtatcaacccagaaacacctagatcagaacaggaatccacattgccagtgacatgagactgaacagccaaatggaggctatgtggagttggcattgcatttaccggcagtgcgggaggaatttctgagtggccatcccaaggtctaggtggaggtggggcatggtatttgagacattccaaaacgaaggcctctgaaggacccttcagaggtggctctggaatgacatgtgtcaagctgcttggacctcgtgctttaagtgcctacattatctaactgtgctcaagaggttctcgactggaggaccacactcaagccgacttatgcccaccatcccacctctggataattttgcataaaattggattagcctggagcaggttgggagccaaatgtggcatttgtgatcatgagattgatgcaatgagatagaagatgtttgctacctgaacacttattgctttgaaactagacttgaggaaaccagggtttatcttttgagaacttttggtaagggaaaagggaacaggaaaagaaaccccaaactcaggccgaatgatcaaggggacccataggaaatcttgtccagagacaagacttcgggaaggtgtctggacattcagaacaccaagacttgaaggtgccttgctcaatggaagaggccaggacagagctgacaaaattttgctccccagtgaaggccacagcaaccttctgcccatcctgtctgttcatggagagggtccctgcctcacctctgccattttgggttaggagaagtcaagttgggagcctgaaatagtggttcttggaaaaatggatccccagtgaaaactagagctctaagcccattcagcccatttcacacctgaaaatgttagtgatcaccacttggaccagcatccttaagtatcagaaagccccaagcaattgctgcatcttagtagggtgagggataagcaaaagaggatgttcaccataacccaggaatgaagataccatcagcaaagaatttcaatttgttcagtctttcatttagagctagtctttcacagtaccatctgaatacctctttgaaagaaggaagactttacgtagtgtagatttgttttgtgttgtttgaaaatattatctttgtaattatttttaatatgtaaggaatgcttggaatatctgctatatgtcaactttatgcagcttccttttgagggacaaatttaaaacaaacaaccccccatcacaaacttaaaggattgcaagggccagatctgttaagtggtttcataggagacacatccagcaattgtgtggtcagtggctcttttacccaataagatacatcacagtcacatgcttgatggtttatgttgacctaagatttattttgttaaaatctctctctgttgtgttcgttcttgttctgttttgttttgttttttaaagtcttgctgtggtctctttgtggcagaagtgtttcatgcatggcagcaggcctgttgcttttttatggcgattcccattgaaaatgtaagtaaatgtctgtggccttgttctctctatggtaaagatattattcaccatgtaaaacaaaaaacaatatttattgtattttagtatatttatataattatgttattgaaaaaaattggcattaaaacttaaccgcatcagaacctattgtaaatacaagttctatttaagtgtactaattaacatataatatatgttttaaatatagaatttttaatgtttttaaatatattttcaaagtacataaaa

SEQ ID NO: 45 - DNA, 4303 bp, Mus musculus
dtaaagcagtagccggctggtgcagaaaagcaacaagttccccagcggtcttcccgccctagcttgacaaggcgaagggtttcttacctggcgacagggaaatctcctgagccgagctcatctttgccagagccccaggtgtgacctgagcagtgggcaaaggatcggcgtgcaaattggattatttttatgggggtactctgaaactccctcactttctctgggaactttttgtgctagggctcagtgacaggcgttgagaaagctgcttcaggaaacgcccgctatatagcagggcaattggacagtcattggtaacctcgctcattcattagaatcacgtaagaactcaaagggaaacgtgtctctcagaatgagggcgtttgcgtaaatctataggtttttcaacatcgatgccagttgctttgtcttctgtagtcgccaaggtggatgagagttgaagctttgcggatattgcgaagggttattagattcataagtcacaccaagtggtgggcgatccactgagcaaagccgaacttctcacatgatgacttcaaacaagacacattaccttcctgcatctgttggggagacaagattttaagacactgagtctccaggacagcaaagccacaatgttccaccaggtgagaagagtgatgaccatccttttccttactatggttatttcatacttcggttgcatgaaggcggcgcccatgaaagaagtaaacgtccacggacaaggcaacttggcctacccaggtgtgcggacccatgggactctggagagcgtgaatgggcccagggcaggttcgagaggtctgacgacgacatcactggctgacacttttgagcacgtcatcgaagagctgctggatgaggaccagaaggttcggcccaacgaagaaaaccataaggacgcggacttgtacacttcccgggtgatgctcagcagtcaagtgcctttggagcctcctctactctttctgctggaggaatacaaaaattacctggatgccgcaaacatgtctatgagggttcggcgccactccgaccctgcccgccgtggggagctgagcgtgtgtgacagtattagcgagtgggtcacagcggcagataaaaagactgcagtggacatgtctggcgggacggtcacagtcctagagaaagtcccggtatccaaaggccaactgaagcagtatttctacgagaccaagtgtaatcccatgggttacaccaaggaaggctgcaggggcatagacaaaaggcactggaactcgcaatgccgaactacccaatcgtatgttcgggcccttactatggatagcaaaaagagaattggctggcgattcataaggatagacacttcctgtgtatgtacactgaccattaaaaggggaagatagtggatttatgttgtatagattatattgagacaaaattatctatttgtatatatacataacagggtaaattattcagttaagaaaaaataattttatgaactgcatgtataaatgaagtttatacagtacagtggttctacaatctatttattggacatatccatgacctgaaaggaaacagtcatttgcgcacaactttaaaagtctgcattacattcctcgataatgttgtggtttgttgccgttgccaagaattgaaaacaaaaagtttaaaaaaaataataataaattgcatgctgctttaattgtgaattgataataaactgtccctctttcagaaaacagattaaaaaaacaaaaaacaaaaaaaaaaaaacaaaaaacaaaaacaaaaattggaaccaaaacattccgtttacattttagacactaagtatcttcgttcttgttagtactctgttttactgctttcgacttctgatagcgttggaattaaaacaatgtcaaggtgctgttgtcattgctttactggcgtaagggacggggaatgggaggggtagatttctgtttgttttgtgttttattttgtttgtttgtttgttttgttttttagttccacccggagtagggatggagaaaatttcttcactatccattctggttgataaagcgttacatttgtatgttgtaaagatgtttgcaaaatccaatcagatgactggaaaacaaataaaaattaaggcaactgaataaaatgctcacactccactgcccatgatgtatctccctggtccccctcagctcactcttctggcatgggtcagggaaaattgcttttattggaaagaccagcatttgttcaaagcatactctttccctccctcctcccattttggtcccttctttttgttttgttttaagaaagaaaattaagttgcgcgctttaaaatattttactactgctacaaacagatgaacaatgtgtgtcattttatgacactcatggaaaacagtgatttttttttaccctaaagaaaaacaaataaaaataacccaaaatattctttttttaaaaggcataaatattgggtaaattgtaatatggcctaacagtgtttgcagataaaagttattgtatacacccagatacttagataagagcagggatccacactgccattgaaataggactgaatggccctgcggaggctaagtggagctgacatactatttcctggcagtgcaggaggaatttctgagtggccatcctaaggtctaggatggaggtggggaatggtacttgagacattcctaaaggaaggctcggaagcacccttcagagcaggctctggaatgatgtgtcaagttgcttaggccttctgctttaagtgcctacattacctaacagtgctcaagaggttctcgattggagaaccacactcaaatccatttatagcctccatcccatttctaaataattgtgtataaagttggattaacctggagcaactttggatccaaatatggcacagcaataatgatattaatgcagcatgatgggaaatgtttgctgtgaagagaattgatttgctttgagcttagacttcaggaagcctaggttttttatttttttatttttgagacattttggtaaaaggaaaaaaagaaaacaaacaaacaaacaaacaaaaccagaaaaagcatcaaaactcaggcagaatgagcaatgtctgaaagggctagaaaaacaagacatagcaaggtgctttcactgtgaaagagacaagaacacaggaggaaatattgcttcagtgaagagcacagacggctcctgccaatttattacaagagtcccgtctgtactttaccctttggggttagaagtcaagttggaagcctgaatgaatggacccaatgagaactagtgttaagcccatttccctagtcaggtttttttcaagcgtgaatgtgttagtggttactctcctgggttcctgagcatcagaaaaaaaaaaaaaaagaggcaaacaatcgcttcatcttaggagtggaaaggaaacagaagtggacgtccgctgtgactcagggagtgaagataccatcagcaaatagtttcttttttgttcattcgttcctttcgagttagcctgtcttttggaataccactgaatatgctgtttttgaaagacttcatgtagcatagattgttttgtgccgtttaccaaattaacctttgtcatcgttttttaacctattcaggaatgcttggaatatctgctctatgttaactttttgcagcttcattctgagagacattagtcaaacaaacaaaaggatccccatcacaatcttacagtactgcaagggccaggtctgttaatcggcttcacaggagacatcagcaattgtgtggtcagtggctggctctcttacccactaagatacatcatagctacatgttggtggtttatgttgacctgagatttatttgttaaaatctcttcttcgtttctgttcgttctggttctgttctgttctgttctgttctgttttggttttaaagtcttgctgtggtctcttgttggcagaaatgttttatgcatggcagcaggcctgttgcttttttatagtgattcccattgaaactgtaagtaaatgtctgtggccttgttctctctatggtaaagatattattcaccatgtaaaacaagaaaaaatatttattgtattttagtatatttatataattatgttattgaaaaaattggcattaaaacttaaccacatcagaagcctattgtaaatacaggttctatttaagtgtaccaattaacatataatatatgttttaaatatagaatttttaatgtttttaaatatattttcaaagt

SEQ ID NO: 46 - DNA, 4162 bp, Mus musculus
dgctttggcaaagccatccacacgtgacaaaacgtaaggaagtggaagaaaccgtctagagcaatatcaagtaccacttaattagagaatatttttttaaccttttcctcctcctgcgccgggtgtgtgatcccggagagcagagtccattcagcaccttggacagagccagcggatttgtccgaggtggtagtacttcatccaggtattcttttcctcgctgtcaagccaacccggtgtcgcccttaaaaagcgtcttttccgaggttcggctcacaccgagatcggggctggagagagagtcagattttggagcggagcgtttggagagcgagccccagtttggtcccctcattgagctcgctgaagttggcttcctagcggtgtaggctggaatagactcttggcaagctccgggttggtatactgggttaactttgggaaatgcaagtgtttatcaccaggatctagccaccggggtggtgtaagccgcaaagaagttccaccaggtgagaagagtgatgaccatccttttccttactatggttatttcatacttcggttgcatgaaggcggcgcccatgaaagaagtaaacgtccacggacaaggcaacttggcctacccaggtgtgcggacccatgggactctggagagcgtgaatgggcccagggcaggttcgagaggtctgacgacgacatcactggctgacacttttgagcacgtcatcgaagagctgctggatgaggaccagaaggttcggcccaacgaagaaaaccataaggacgcggacttgtacacttcccgggtgatgctcagcagtcaagtgcctttggagcctcctctactctttctgctggaggaatacaaaaattacctggatgccgcaaacatgtctatgagggttcggcgccactccgaccctgcccgccgtggggagctgagcgtgtgtgacagtattagcgagtgggtcacagcggcagataaaaagactgcagtggacatgtctggcgggacggtcacagtcctagagaaagtcccggtatccaaaggccaactgaagcagtatttctacgagaccaagtgtaatcccatgggttacaccaaggaaggctgcaggggcatagacaaaaggcactggaactcgcaatgccgaactacccaatcgtatgttcgggcccttactatggatagcaaaaagagaattggctggcgattcataaggatagacacttcctgtgtatgtacactgaccattaaaaggggaagatagtggatttatgttgtatagattatattgagacaaaattatctatttgtatatatacataacagggtaaattattcagttaagaaaaaataattttatgaactgcatgtataaatgaagtttatacagtacagtggttctacaatctatttattggacatatccatgacctgaaaggaaacagtcatttgcgcacaactttaaaagtctgcattacattcctcgataatgttgtggtttgttgccgttgccaagaattgaaaacaaaaagtttaaaaaaaataataataaattgcatgctgctttaattgtgaattgataataaactgtccctctttcagaaaacagattaaaaaaacaaaaaacaaaaaaaaaaaaacaaaaaacaaaaacaaaaattggaaccaaaacattccgtttacattttagacactaagtatcttcgttcttgttagtactctgttttactgctttcgacttctgatagcgttggaattaaaacaatgtcaaggtgctgttgtcattgctttactggcgtaagggacggggaatgggaggggtagatttctgtttgttttgtgttttattttgtttgtttgtttgttttgttttttagttccacccggagtagggatggagaaaatttcttcactatccattctggttgataaagcgttacatttgtatgttgtaaagatgtttgcaaaatccaatcagatgactggaaaacaaataaaaattaaggcaactgaataaaatgctcacactccactgcccatgatgtatctccctggtccccctcagctcactcttctggcatgggtcagggaaaattgcttttattggaaagaccagcatttgttcaaagcatactctttccctccctcctcccattttggtcccttctttttgttttgttttaagaaagaaaattaagttgcgcgctttaaaatattttactactgctacaaacagatgaacaatgtgtgtcattttatgacactcatggaaaacagtgatttttttttaccctaaagaaaaacaaataaaaataacccaaaatattctttttttaaaaggcataaatattgggtaaattgtaatatggcctaacagtgtttgcagataaaagttattgtatacacccagatacttagataagagcagggatccacactgccattgaaataggactgaatggccctgcggaggctaagtggagctgacatactatttcctggcagtgcaggaggaatttctgagtggccatcctaaggtctaggatggaggtggggaatggtacttgagacattcctaaaggaaggctcggaagcacccttcagagcaggctctggaatgatgtgtcaagttgcttaggccttctgctttaagtgcctacattacctaacagtgctcaagaggttctcgattggagaaccacactcaaatccatttatagcctccatcccatttctaaataattgtgtataaagttggattaacctggagcaactttggatccaaatatggcacagcaataatgatattaatgcagcatgatgggaaatgtttgctgtgaagagaattgatttgctttgagcttagacttcaggaagcctaggttttttatttttttatttttgagacattttggtaaaaggaaaaaaagaaaacaaacaaacaaacaaacaaaaccagaaaaagcatcaaaactcaggcagaatgagcaatgtctgaaagggctagaaaaacaagacatagcaaggtgctttcactgtgaaagagacaagaacacaggaggaaatattgcttcagtgaagagcacagacggctcctgccaatttattacaagagtcccgtctgtactttaccctttggggttagaagtcaagttggaagcctgaatgaatggacccaatgagaactagtgttaagcccatttccctagtcaggtttttttcaagcgtgaatgtgttagtggttactctcctgggttcctgagcatcagaaaaaaaaaaaaaaagaggcaaacaatcgcttcatcttaggagtggaaaggaaacagaagtggacgtccgctgtgactcagggagtgaagataccatcagcaaatagtttcttttttgttcattcgttcctttcgagttagcctgtcttttggaataccactgaatatgctgtttttgaaagacttcatgtagcatagattgttttgtgccgtttaccaaattaacctttgtcatcgttttttaacctattcaggaatgcttggaatatctgctctatgttaactttttgcagcttcattctgagagacattagtcaaacaaacaaaaggatccccatcacaatcttacagtactgcaagggccaggtctgttaatcggcttcacaggagacatcagcaattgtgtggtcagtggctggctctcttacccactaagatacatcatagctacatgttggtggtttatgttgacctgagatttatttgttaaaatctcttcttcgtttctgttcgttctggttctgttctgttctgttctgttctgttttggttttaaagtcttgctgtggtctcttgttggcagaaatgttttatgcatggcagcaggcctgttgcttttttatagtgattcccattgaaactgtaagtaaatgtctgtggccttgttctctctatggtaaagatattattcaccatgtaaaacaagaaaaaatatttattgtattttagtatatttatataattatgttattgaaaaaattggcattaaaacttaaccacatcagaagcctattgtaaatacaggttctatttaagtgtaccaattaacatataatatatgttttaaatatagaatttttaatgtttttaaatatattttcaaagt

SEQ ID NO: 47 - DNA, 4002 bp, Mus musculus
dacccactttcccattcaccgaggagaggactgctctcgctgccgctccccccacccacccccggcgagctagcatgaaatctcccagcctctgcctagatcaaatggagcttctcgctgaaggcgtgcgagtattacctccgccatgcaatttccactatcaataatttaacttctttgctgcagaacaggagtacatatcggccaccaaagactcgccccctcccccttttaactgaagagaaggggaaatatatagtaagagtctagaaccttggggaccggtcttccccagagcagctgccttgatgtttactttgacaagtagtgactgaaaaagttccaccaggtgagaagagtgatgaccatccttttccttactatggttatttcatacttcggttgcatgaaggcggcgcccatgaaagaagtaaacgtccacggacaaggcaacttggcctacccaggtgtgcggacccatgggactctggagagcgtgaatgggcccagggcaggttcgagaggtctgacgacgacatcactggctgacacttttgagcacgtcatcgaagagctgctggatgaggaccagaaggttcggcccaacgaagaaaaccataaggacgcggacttgtacacttcccgggtgatgctcagcagtcaagtgcctttggagcctcctctactctttctgctggaggaatacaaaaattacctggatgccgcaaacatgtctatgagggttcggcgccactccgaccctgcccgccgtggggagctgagcgtgtgtgacagtattagcgagtgggtcacagcggcagataaaaagactgcagtggacatgtctggcgggacggtcacagtcctagagaaagtcccggtatccaaaggccaactgaagcagtatttctacgagaccaagtgtaatcccatgggttacaccaaggaaggctgcaggggcatagacaaaaggcactggaactcgcaatgccgaactacccaatcgtatgttcgggcccttactatggatagcaaaaagagaattggctggcgattcataaggatagacacttcctgtgtatgtacactgaccattaaaaggggaagatagtggatttatgttgtatagattatattgagacaaaattatctatttgtatatatacataacagggtaaattattcagttaagaaaaaataattttatgaactgcatgtataaatgaagtttatacagtacagtggttctacaatctatttattggacatatccatgacctgaaaggaaacagtcatttgcgcacaactttaaaagtctgcattacattcctcgataatgttgtggtttgttgccgttgccaagaattgaaaacaaaaagtttaaaaaaaataataataaattgcatgctgctttaattgtgaattgataataaactgtccctctttcagaaaacagattaaaaaaacaaaaaacaaaaaaaaaaaaacaaaaaacaaaaacaaaaattggaaccaaaacattccgtttacattttagacactaagtatcttcgttcttgttagtactctgttttactgctttcgacttctgatagcgttggaattaaaacaatgtcaaggtgctgttgtcattgctttactggcgtaagggacggggaatgggaggggtagatttctgtttgttttgtgttttattttgtttgtttgtttgttttgttttttagttccacccggagtagggatggagaaaatttcttcactatccattctggttgataaagcgttacatttgtatgttgtaaagatgtttgcaaaatccaatcagatgactggaaaacaaataaaaattaaggcaactgaataaaatgctcacactccactgcccatgatgtatctccctggtccccctcagctcactcttctggcatgggtcagggaaaattgcttttattggaaagaccagcatttgttcaaagcatactctttccctccctcctcccattttggtcccttctttttgttttgttttaagaaagaaaattaagttgcgcgctttaaaatattttactactgctacaaacagatgaacaatgtgtgtcattttatgacactcatggaaaacagtgatttttttttaccctaaagaaaaacaaataaaaataacccaaaatattctttttttaaaaggcataaatattgggtaaattgtaatatggcctaacagtgtttgcagataaaagttattgtatacacccagatacttagataagagcagggatccacactgccattgaaataggactgaatggccctgcggaggctaagtggagctgacatactatttcctggcagtgcaggaggaatttctgagtggccatcctaaggtctaggatggaggtggggaatggtacttgagacattcctaaaggaaggctcggaagcacccttcagagcaggctctggaatgatgtgtcaagttgcttaggccttctgctttaagtgcctacattacctaacagtgctcaagaggttctcgattggagaaccacactcaaatccatttatagcctccatcccatttctaaataattgtgtataaagttggattaacctggagcaactttggatccaaatatggcacagcaataatgatattaatgcagcatgatgggaaatgtttgctgtgaagagaattgatttgctttgagcttagacttcaggaagcctaggttttttatttttttatttttgagacattttggtaaaaggaaaaaaagaaaacaaacaaacaaacaaacaaaaccagaaaaagcatcaaaactcaggcagaatgagcaatgtctgaaagggctagaaaaacaagacatagcaaggtgctttcactgtgaaagagacaagaacacaggaggaaatattgcttcagtgaagagcacagacggctcctgccaatttattacaagagtcccgtctgtactttaccctttggggttagaagtcaagttggaagcctgaatgaatggacccaatgagaactagtgttaagcccatttccctagtcaggtttttttcaagcgtgaatgtgttagtggttactctcctgggttcctgagcatcagaaaaaaaaaaaaaaagaggcaaacaatcgcttcatcttaggagtggaaaggaaacagaagtggacgtccgctgtgactcagggagtgaagataccatcagcaaatagtttcttttttgttcattcgttcctttcgagttagcctgtcttttggaataccactgaatatgctgtttttgaaagacttcatgtagcatagattgttttgtgccgtttaccaaattaacctttgtcatcgttttttaacctattcaggaatgcttggaatatctgctctatgttaactttttgcagcttcattctgagagacattagtcaaacaaacaaaaggatccccatcacaatcttacagtactgcaagggccaggtctgttaatcggcttcacaggagacatcagcaattgtgtggtcagtggctggctctcttacccactaagatacatcatagctacatgttggtggtttatgttgacctgagatttatttgttaaaatctcttcttcgtttctgttcgttctggttctgttctgttctgttctgttctgttttggttttaaagtcttgctgtggtctcttgttggcagaaatgttttatgcatggcagcaggcctgttgcttttttatagtgattcccattgaaactgtaagtaaatgtctgtggccttgttctctctatggtaaagatattattcaccatgtaaaacaagaaaaaatatttattgtattttagtatatttatataattatgttattgaaaaaattggcattaaaacttaaccacatcagaagcctattgtaaatacaggttctatttaagtgtaccaattaacatataatatatgttttaaatatagaatttttaatgtttttaaatatattttcaaagt

SEQ ID NO: 48 - DNA, 4019 bp, Rattus novergicus
dccaatcgaagctcaaccgaagagctaaataatgtctgaccccagtgcctggcgctggctgagctctgggtgcccgccgctgccgccgcgccggggcgcacccgctggctggctgtcgcacggtccccattgcgcccgggactccccggcttggagaaggaaaccgcctggggcggcgcgccacctccgcctggcaggctttgatgagaccgggttccctcagctcgccaccgctgctttggggcagacgagaaagcgcacggggcccagggcagggcgcagggaccaggagcgtgacaacaatgtgactccactgccggggatccgagagctttgtgtggaccctgagttccaccaggtgagaagagtgatgaccatccttttccttactatggttatttcatacttcggttgcatgaaggctgcgcccatgaaagaagcaaacgtccacggacaaggcaacttggcctacccagctgtgcggacccatgggactctggagagcgtgaatgggcccagggcaggttcgagaggtctgacgacgacgtccctggctgacacttttgagcacgtgatcgaagagctgctggatgaggaccagaaggttcggcccaacgaagaaaaccataaggacgcggacttgtacacttcccgggtgatgctcagcagtcaagtgcctttggagcctcctctgctctttctgctggaggaatacaaaaattacctggatgccgcaaacatgtctatgagggttcggcgccactccgaccccgcccgccgtggggagctgagcgtgtgtgacagtattagcgagtgggtcacagcggcagataaaaagactgcagtggacatgtccggtgggacggtcacagtcctggagaaagtcccggtatcaaaaggccaactgaagcaatatttctacgagaccaagtgtaatcccatgggttacacgaaggaaggctgcaggggcatagacaaaaggcactggaactcgcaatgccgaactacccaatcgtatgttcgggcccttactatggatagcaaaaagagaattggctggcggttcataaggatagacacttcctgtgtatgtacactgaccattaaaaggggaagatagtggatttatgttgtatagattatattgagacaaaaattatctatttgtatatatacataacagggtaaattattcagttaagaaaaagataattttatgaactgcatgtataaatgaagtttatacagtacagtggttctacaatctatttattggacatatccatgaccagaaagaaacagtcatttgcgcacaactttaaaagtctgcattacattcctcgataatgttgtggtttgttgccgttgccaagaattgaaaacaaaaagttaaaaaaaataataaattgcatgctgctttaattgtgaattgataataaactgtccctctttcagaaaacagacaaaaaaacaaaaaacaaaaaaaagcaaaaacaaaaatttgaaccaaaacattccgtttacattttagacactaagtatcttcgttcttgttagtactctgttctactgctttcaacttctcatagcgttggaattaaaactatgtcaaggtgctgttgtcattgctttactggcttaggggatggggaacgggaggggtagatttctgtttgttttgtgttttatttcgtttgtttgtttgttttgtttttttagttccacccggagtagggatggagaaaatttcttcactctccattctggttgataaagcgttacatttgtatgttgtaaaaaatgtttgcaaaatccaatcagatgactggaaaacgaataaaaattaaggcaactgaataaaatgctcacacaacactgcccatgatgtatctccctggtcccccaggtcactcttctggcatgggtcagggaaagctgcttttattggaaagaccagcatttgtttaaagcacattctttccctccctcctcccattttggtccctttcttttttgttttgttttaagaaagaaaattaagttgcgcgctttgaaatattttatcactgctgtgaacagatgaacaatgtgtgtcatttcatgacactcgtggaaaacagtgattttttttttattttttgccctaaggagaaacaagtaagaataaccgaaaatgttctttttttttaaaggcataaacagtggataagttataatatggcctaacaatgtttgcagataaaagatattgcatacagccagatactagagcagggatccacactgccactgaaatgcgactgaatggccctgtggaggctaagtggagctgacatactatttcctggcagagcaggaggaatttctgagtggccatcctgaggtctagatggaggtggggaatggtacttgagacattcctaaaggaaggctcggaagcacccttcagagcaggctctggaatgatgtgtcaagtttcttaggccttctgctttaagtgcctacgttacctaacagtgctcaagaggttctcaattggagaaccacactcaaatccatttatggcctccatcccattttaaataattatggataaagttggattaacctggagcagctttggatccaaatatggcatagcagtgatgctatcagtgcagcatgatgggaaatgtttgctgtgaagagacttaactttctttgcgcttagacttcaggaagcctaggttttatttatttatttttttgagacattttggtgaaaggaaaaaagaaagaagaaaacaaacaaacaaaaccagaaaaagcaccaaaacttaggcagaatgagcaatgtctgtctgtaagggctagaatgacaaggcataggaaggtgctttcactgtgaaagagacaagaacacaggaggaaatactgcttaagtgaagagcacagaaagctcctgatagttctgtccattcagcacaagggtcccttctacactttacctcttggggttaggagaagtcaagctggaagcctgaatgaatggccccaatgagaactagtgttaagcccatttccctagtgaggttttccgccagcgcgaatgtgttagtggttacctgactgggctcctgggcatcagaaaaagaggcaaacaattgcttcatcttaggagtggaaagggtgaaacaaagtggctgtccactgtgactcagggagtgaagataccatcagcaaatagtttctttttgttcaactgttcctttagaactagtctgtcttctggagtcccactgaatcccctgtttttggaagacttcacgtagcctagattgttttgtgccgtttgacaacattaatctctgtcatcatttttaacctattaaggaatgctttgaatatctgctatatgctaactttttgcagcttcattctgagagacgttagtcaaacaaataaaaggagccccatcacaatctcacggtattcgaagggccaggtcgattaggtggcttcataggagaccctccgcaactgtgtggtcagtggctggctctcatacccactaagatacatcatagctccatgtcggtggtttatgttgacctgagattgatttgttaaaatctctcctctgtttctgttcgttctgtttccgtcctgttctgttctgttctgttctgaaagtcttgctgtggtctctttttggcagaagtgtttcatgcatggcagcaggcctgatgctttttatagtgattcccattgaaactgtaagtaaatgtctgtggccttgttctctctatggtaaagatattattcaccatgtaaaacaagaaaaatatttattgtattttagtatatttatataattatgttattgaaaaaaattggcattaaaacttaaccacatcagaagcctattgtaaatacaggttctatttaagtgtaccaattaacatataatatatgttttaaatatagaatttttaatgtttttaaatatattttcaaagtacataaaaaaaaaaaaaaaa

SEQ ID NO: 49 - DNA, 4310 bp, Rattus novergicus
dtaaagcggtagccggctggtgcaggaaagcaacaagttccccagcggtcttcccgccctagcctgacaaggcgaaggttttcttacctggcgacagggaaatctcctgagccgagctcatctttgccacagccccaggtgtgacctgagcagtgggcaaaggagcggcgtgcaaattggattatttgtatgggggtactctgaaactccctcactttttctgggaactttttgtgctagggcgcagtgacaggcgttgagaaagctgcttcaggaaacgcccgctatatagcagggcagttggacagtcattggtaacctcgctcattcattagaatcacgtaagaactcaaagggaaacgtgtctctcagaatgagggcgtttgcgtaaatctataggtttttcaacatcgatgccagttgctttgtcttctgtaatcgccaaggtggatgagagttgaagcttgcggatattgcaaagggttattagattcataagtcacaccaagtggtgggcgatccactgagcaaagccgaacttctcacatgatgacttcaaacaagacacattaccttccagcatctgttggggagacgagattttaagacactgagtctccaggacagcaaagccacaatgttccaccaggtgagaagagtgatgaccatccttttccttactatggttatttcatacttcggttgcatgaaggctgcgcccatgaaagaagcaaacgtccacggacaaggcaacttggcctacccagctgtgcggacccatgggactctggagagcgtgaatgggcccagggcaggttcgagaggtctgacgacgacgtccctggctgacacttttgagcacgtgatcgaagagctgctggatgaggaccagaaggttcggcccaacgaagaaaaccataaggacgcggacttgtacacttcccgggtgatgctcagcagtcaagtgcctttggagcctcctctgctctttctgctggaggaatacaaaaattacctggatgccgcaaacatgtctatgagggttcggcgccactccgaccccgcccgccgtggggagctgagcgtgtgtgacagtattagcgagtgggtcacagcggcagataaaaagactgcagtggacatgtccggtgggacggtcacagtcctggagaaagtcccggtatcaaaaggccaactgaagcaatatttctacgagaccaagtgtaatcccatgggttacacgaaggaaggctgcaggggcatagacaaaaggcactggaactcgcaatgccgaactacccaatcgtatgttcgggcccttactatggatagcaaaaagagaattggctggcggttcataaggatagacacttcctgtgtatgtacactgaccattaaaaggggaagatagtggatttatgttgtatagattatattgagacaaaaattatctatttgtatatatacataacagggtaaattattcagttaagaaaaagataattttatgaactgcatgtataaatgaagtttatacagtacagtggttctacaatctatttattggacatatccatgaccagaaagaaacagtcatttgcgcacaactttaaaagtctgcattacattcctcgataatgttgtggtttgttgccgttgccaagaattgaaaacaaaaagttaaaaaaaataataaattgcatgctgctttaattgtgaattgataataaactgtccctctttcagaaaacagacaaaaaaacaaaaaacaaaaaaaagcaaaaacaaaaatttgaaccaaaacattccgtttacattttagacactaagtatcttcgttcttgttagtactctgttctactgctttcaacttctcatagcgttggaattaaaactatgtcaaggtgctgttgtcattgctttactggcttaggggatggggaacgggaggggtagatttctgtttgttttgtgttttatttcgtttgtttgtttgttttgtttttttagttccacccggagtagggatggagaaaatttcttcactctccattctggttgataaagcgttacatttgtatgttgtaaaaaatgtttgcaaaatccaatcagatgactggaaaacgaataaaaattaaggcaactgaataaaatgctcacacaacactgcccatgatgtatctccctggtcccccaggtcactcttctggcatgggtcagggaaagctgcttttattggaaagaccagcatttgtttaaagcacattctttccctccctcctcccattttggtccctttcttttttgttttgttttaagaaagaaaattaagttgcgcgctttgaaatattttatcactgctgtgaacagatgaacaatgtgtgtcatttcatgacactcgtggaaaacagtgattttttttttattttttgccctaaggagaaacaagtaagaataaccgaaaatgttctttttttttaaaggcataaacagtggataagttataatatggcctaacaatgtttgcagataaaagatattgcatacagccagatactagagcagggatccacactgccactgaaatgcgactgaatggccctgtggaggctaagtggagctgacatactatttcctggcagagcaggaggaatttctgagtggccatcctgaggtctagatggaggtggggaatggtacttgagacattcctaaaggaaggctcggaagcacccttcagagcaggctctggaatgatgtgtcaagtttcttaggccttctgctttaagtgcctacgttacctaacagtgctcaagaggttctcaattggagaaccacactcaaatccatttatggcctccatcccattttaaataattatggataaagttggattaacctggagcagctttggatccaaatatggcatagcagtgatgctatcagtgcagcatgatgggaaatgtttgctgtgaagagacttaactttctttgcgcttagacttcaggaagcctaggttttatttatttatttttttgagacattttggtgaaaggaaaaaagaaagaagaaaacaaacaaacaaaaccagaaaaagcaccaaaacttaggcagaatgagcaatgtctgtctgtaagggctagaatgacaaggcataggaaggtgctttcactgtgaaagagacaagaacacaggaggaaatactgcttaagtgaagagcacagaaagctcctgatagttctgtccattcagcacaagggtcccttctacactttacctcttggggttaggagaagtcaagctggaagcctgaatgaatggccccaatgagaactagtgttaagcccatttccctagtgaggttttccgccagcgcgaatgtgttagtggttacctgactgggctcctgggcatcagaaaaagaggcaaacaattgcttcatcttaggagtggaaagggtgaaacaaagtggctgtccactgtgactcagggagtgaagataccatcagcaaatagtttctttttgttcaactgttcctttagaactagtctgtcttctggagtcccactgaatcccctgtttttggaagacttcacgtagcctagattgttttgtgccgtttgacaacattaatctctgtcatcatttttaacctattaaggaatgctttgaatatctgctatatgctaactttttgcagcttcattctgagagacgttagtcaaacaaataaaaggagccccatcacaatctcacggtattcgaagggccaggtcgattaggtggcttcataggagaccctccgcaactgtgtggtcagtggctggctctcatacccactaagatacatcatagctccatgtcggtggtttatgttgacctgagattgatttgttaaaatctctcctctgtttctgttcgttctgtttccgtcctgttctgttctgttctgttctgaaagtcttgctgtggtctctttttggcagaagtgtttcatgcatggcagcaggcctgatgctttttatagtgattcccattgaaactgtaagtaaatgtctgtggccttgttctctctatggtaaagatattattcaccatgtaaaacaagaaaaatatttattgtattttagtatatttatataattatgttattgaaaaaaattggcattaaaacttaaccacatcagaagcctattgtaaatacaggttctatttaagtgtaccaattaacatataatatatgttttaaatatagaatttttaatgtttttaaatatattttcaaagtacataaaaaaaaaaaaaaaa

SEQ ID NO: 50 - DNA, 4170 bp, Rattus novergicus
dgctttggcaaagccatccgcacgtgacaaaacgtaaggaagtggaagaaaccgtctagagcaatatcaagtaccacttaattagagaatatttttttaaccttttcctcctgctgcgccgggtgtgtgatccgggcgagcagagtccattcagcaccttggacagagccagcggatttgtccgaggtggtagtacttcatccaggtattcttttcctcgctgtcaagccaacccggtgtcgcccttaaaaagcgtcttttccgaggttcggctcacactgagatcggggctggagagagagtcagattttggagcggagcgtttggagagccagccccagtttggtcccctcattgagctcgctgaagttggcttcctagcggtgtaggctggaatagactcttggcaagctccgggttggtatactgggttaactttgggaaatgcaagtgtttatctccaggatctagccaccggggtggtgtaagccgcaaagaagttccaccaggtgagaagagtgatgaccatccttttccttactatggttatttcatacttcggttgcatgaaggctgcgcccatgaaagaagcaaacgtccacggacaaggcaacttggcctacccagctgtgcggacccatgggactctggagagcgtgaatgggcccagggcaggttcgagaggtctgacgacgacgtccctggctgacacttttgagcacgtgatcgaagagctgctggatgaggaccagaaggttcggcccaacgaagaaaaccataaggacgcggacttgtacacttcccgggtgatgctcagcagtcaagtgcctttggagcctcctctgctctttctgctggaggaatacaaaaattacctggatgccgcaaacatgtctatgagggttcggcgccactccgaccccgcccgccgtggggagctgagcgtgtgtgacagtattagcgagtgggtcacagcggcagataaaaagactgcagtggacatgtccggtgggacggtcacagtcctggagaaagtcccggtatcaaaaggccaactgaagcaatatttctacgagaccaagtgtaatcccatgggttacacgaaggaaggctgcaggggcatagacaaaaggcactggaactcgcaatgccgaactacccaatcgtatgttcgggcccttactatggatagcaaaaagagaattggctggcggttcataaggatagacacttcctgtgtatgtacactgaccattaaaaggggaagatagtggatttatgttgtatagattatattgagacaaaaattatctatttgtatatatacataacagggtaaattattcagttaagaaaaagataattttatgaactgcatgtataaatgaagtttatacagtacagtggttctacaatctatttattggacatatccatgaccagaaagaaacagtcatttgcgcacaactttaaaagtctgcattacattcctcgataatgttgtggtttgttgccgttgccaagaattgaaaacaaaaagttaaaaaaaataataaattgcatgctgctttaattgtgaattgataataaactgtccctctttcagaaaacagacaaaaaaacaaaaaacaaaaaaaagcaaaaacaaaaatttgaaccaaaacattccgtttacattttagacactaagtatcttcgttcttgttagtactctgttctactgctttcaacttctcatagcgttggaattaaaactatgtcaaggtgctgttgtcattgctttactggcttaggggatggggaacgggaggggtagatttctgtttgttttgtgttttatttcgtttgtttgtttgttttgtttttttagttccacccggagtagggatggagaaaatttcttcactctccattctggttgataaagcgttacatttgtatgttgtaaaaaatgtttgcaaaatccaatcagatgactggaaaacgaataaaaattaaggcaactgaataaaatgctcacacaacactgcccatgatgtatctccctggtcccccaggtcactcttctggcatgggtcagggaaagctgcttttattggaaagaccagcatttgtttaaagcacattctttccctccctcctcccattttggtccctttcttttttgttttgttttaagaaagaaaattaagttgcgcgctttgaaatattttatcactgctgtgaacagatgaacaatgtgtgtcatttcatgacactcgtggaaaacagtgattttttttttattttttgccctaaggagaaacaagtaagaataaccgaaaatgttctttttttttaaaggcataaacagtggataagttataatatggcctaacaatgtttgcagataaaagatattgcatacagccagatactagagcagggatccacactgccactgaaatgcgactgaatggccctgtggaggctaagtggagctgacatactatttcctggcagagcaggaggaatttctgagtggccatcctgaggtctagatggaggtggggaatggtacttgagacattcctaaaggaaggctcggaagcacccttcagagcaggctctggaatgatgtgtcaagtttcttaggccttctgctttaagtgcctacgttacctaacagtgctcaagaggttctcaattggagaaccacactcaaatccatttatggcctccatcccattttaaataattatggataaagttggattaacctggagcagctttggatccaaatatggcatagcagtgatgctatcagtgcagcatgatgggaaatgtttgctgtgaagagacttaactttctttgcgcttagacttcaggaagcctaggttttatttatttatttttttgagacattttggtgaaaggaaaaaagaaagaagaaaacaaacaaacaaaaccagaaaaagcaccaaaacttaggcagaatgagcaatgtctgtctgtaagggctagaatgacaaggcataggaaggtgctttcactgtgaaagagacaagaacacaggaggaaatactgcttaagtgaagagcacagaaagctcctgatagttctgtccattcagcacaagggtcccttctacactttacctcttggggttaggagaagtcaagctggaagcctgaatgaatggccccaatgagaactagtgttaagcccatttccctagtgaggttttccgccagcgcgaatgtgttagtggttacctgactgggctcctgggcatcagaaaaagaggcaaacaattgcttcatcttaggagtggaaagggtgaaacaaagtggctgtccactgtgactcagggagtgaagataccatcagcaaatagtttctttttgttcaactgttcctttagaactagtctgtcttctggagtcccactgaatcccctgtttttggaagacttcacgtagcctagattgttttgtgccgtttgacaacattaatctctgtcatcatttttaacctattaaggaatgctttgaatatctgctatatgctaactttttgcagcttcattctgagagacgttagtcaaacaaataaaaggagccccatcacaatctcacggtattcgaagggccaggtcgattaggtggcttcataggagaccctccgcaactgtgtggtcagtggctggctctcatacccactaagatacatcatagctccatgtcggtggtttatgttgacctgagattgatttgttaaaatctctcctctgtttctgttcgttctgtttccgtcctgttctgttctgttctgttctgaaagtcttgctgtggtctctttttggcagaagtgtttcatgcatggcagcaggcctgatgctttttatagtgattcccattgaaactgtaagtaaatgtctgtggccttgttctctctatggtaaagatattattcaccatgtaaaacaagaaaaatatttattgtattttagtatatttatataattatgttattgaaaaaaattggcattaaaacttaaccacatcagaagcctattgtaaatacaggttctatttaagtgtaccaattaacatataatatatgttttaaatatagaatttttaatgtttttaaatatattttcaaagtacataaaaaaaaaaaaaaaa

SEQ ID NO: 51 - protein, 248 aa, Homo sapiens
PMTILFLTMVISYFGCMKAAPMKEANIRGQGGLAYPGVRTHGTLESVNGPKAGSRGLTSLADTFEHVIEELLDEDHKVRPNEENNKDADLYTSRVMLSSQVPLEPPLLFLLEEYKNYLDAANMSMMVLRHSDPARRGELSVCDSISEWVTAADKKTAVDMSGGTVTVLEKVPVSKGQLKQYFYETKCNPMGYTKEGCRGIDKRHWNSQCRTTQSYVRALTMDSKKRIGWRFIRIDTSCVCTLTIKRGR

SEQ ID NO: 52 - protein, 258 aa, Mus musculus
PMFHQVRRVMTILFLTMVISYFGCMKAAPMKEVNVHGQGNLAYPGVRTHGTLESVNGPRAGSRGLTTTSLADTFEHVIEELLDEDQKVRPNEENHKDADLYTSRVMLSSQVPLEPPLLFLLEEYKNYLDAANMSMRVRRHSDPARRGELSVCDSISEWVTAADKKTAVDMSGGTVTVLEKVPVSKGQLKQYFYETKCNPMGYTKEGCRGIDKRHWNSQCRTTQSYVRALTMDSKKRIGWRFIRIDTSCVCTLTIKRGR

SEQ ID NO: 53 - protein, 250 aa, Mus musculus
PMTILFLTMVISYFGCMKAAPMKEVNVHGQGNLAYPGVRTHGTLESVNGPRAGSRGLTTTSLADTFEHVIEELLDEDQKVRPNEENHKDADLYTSRVMLSSQVPLEPPLLFLLEEYKNYLDAANMSMRVRRHSDPARRGELSVCDSISEWVTAADKKTAVDMSGGTVTVLEKVPVSKGQLKQYFYETKCNPMGYTKEGCRGIDKRHWNSQCRTTQSYVRALTMDSKKRIGWRFIRIDTSCVCTLTIKRGR

SEQ ID NO: 54 - protein, 250 aa, Rattus Novergicus
PMTILFLTMVISYFGCMKAAPMKEANVHGQGNLAYPAVRTHGTLESVNGPRAGSRGLTTTSLADTFEHVIEELLDEDQKVRPNEENHKDADLYTSRVMLSSQVPLEPPLLFLLEEYKNYLDAANMSMRVRRHSDPARRGELSVCDSISEWVTAADKKTAVDMSGGTVTVLEKVPVSKGQLKQYFYETKCNPMGYTKEGCRGIDKRHWNSQCRTTQSYVRALTMDSKKRIGWRFIRIDTSCVCTLTIKRGR

SEQ ID NO: 55 - DNA, 4625 bp, Homo sapiens
dggaggaggtggaggaggagggctgcttgaggaagtataagaatgaagttgtgaagctgagattcccctccattgggaccggagaaaccaggggagccccccgggcagccgcgcgccccttcccacggggccctttactgcgccgcgcgcccggcccccacccctcgcagcaccccgcgccccgcgccctcccagccgggtccagccggagccatggggccggagccgcagtgagcaccatggagctggcggccttgtgccgctgggggctcctcctcgccctcttgccccccggagccgcgagcacccaagtgtgcaccggcacagacatgaagctgcggctccctgccagtcccgagacccacctggacatgctccgccacctctaccagggctgccaggtggtgcagggaaacctggaactcacctacctgcccaccaatgccagcctgtccttcctgcaggatatccaggaggtgcagggctacgtgctcatcgctcacaaccaagtgaggcaggtcccactgcagaggctgcggattgtgcgaggcacccagctctttgaggacaactatgccctggccgtgctagacaatggagacccgctgaacaataccacccctgtcacaggggcctccccaggaggcctgcgggagctgcagcttcgaagcctcacagagatcttgaaaggaggggtcttgatccagcggaacccccagctctgctaccaggacacgattttgtggaaggacatcttccacaagaacaaccagctggctctcacactgatagacaccaaccgctctcgggcctgccacccctgttctccgatgtgtaagggctcccgctgctggggagagagttctgaggattgtcagagcctgacgcgcactgtctgtgccggtggctgtgcccgctgcaaggggccactgcccactgactgctgccatgagcagtgtgctgccggctgcacgggccccaagcactctgactgcctggcctgcctccacttcaaccacagtggcatctgtgagctgcactgcccagccctggtcacctacaacacagacacgtttgagtccatgcccaatcccgagggccggtatacattcggcgccagctgtgtgactgcctgtccctacaactacctttctacggacgtgggatcctgcaccctcgtctgccccctgcacaaccaagaggtgacagcagaggatggaacacagcggtgtgagaagtgcagcaagccctgtgcccgagtgtgctatggtctgggcatggagcacttgcgagaggtgagggcagttaccagtgccaatatccaggagtttgctggctgcaagaagatctttgggagcctggcatttctgccggagagctttgatggggacccagcctccaacactgccccgctccagccagagcagctccaagtgtttgagactctggaagagatcacaggttacctatacatctcagcatggccggacagcctgcctgacctcagcgtcttccagaacctgcaagtaatccggggacgaattctgcacaatggcgcctactcgctgaccctgcaagggctgggcatcagctggctggggctgcgctcactgagggaactgggcagtggactggccctcatccaccataacacccacctctgcttcgtgcacacggtgccctgggaccagctctttcggaacccgcaccaagctctgctccacactgccaaccggccagaggacgagtgtgtgggcgagggcctggcctgccaccagctgtgcgcccgagggcactgctggggtccagggcccacccagtgtgtcaactgcagccagttccttcggggccaggagtgcgtggaggaatgccgagtactgcaggggctccccagggagtatgtgaatgccaggcactgtttgccgtgccaccctgagtgtcagccccagaatggctcagtgacctgttttggaccggaggctgaccagtgtgtggcctgtgcccactataaggaccctcccttctgcgtggcccgctgccccagcggtgtgaaacctgacctctcctacatgcccatctggaagtttccagatgaggagggcgcatgccagccttgccccatcaactgcacccactcctgtgtggacctggatgacaagggctgccccgccgagcagagagccagccctctgacgtccatcatctctgcggtggttggcattctgctggtcgtggtcttgggggtggtctttgggatcctcatcaagcgacggcagcagaagatccggaagtacacgatgcggagactgctgcaggaaacggagctggtggagccgctgacacctagcggagcgatgcccaaccaggcgcagatgcggatcctgaaagagacggagctgaggaaggtgaaggtgcttggatctggcgcttttggcacagtctacaagggcatctggatccctgatggggagaatgtgaaaattccagtggccatcaaagtgttgagggaaaacacatcccccaaagccaacaaagaaatcttagacgaagcatacgtgatggctggtgtgggctccccatatgtctcccgccttctgggcatctgcctgacatccacggtgcagctggtgacacagcttatgccctatggctgcctcttagaccatgtccgggaaaaccgcggacgcctgggctcccaggacctgctgaactggtgtatgcagattgccaaggggatgagctacctggaggatgtgcggctcgtacacagggacttggccgctcggaacgtgctggtcaagagtcccaaccatgtcaaaattacagacttcgggctggctcggctgctggacattgacgagacagagtaccatgcagatgggggcaaggtgcccatcaagtggatggcgctggagtccattctccgccggcggttcacccaccagagtgatgtgtggagttatggtgtgactgtgtgggagctgatgacttttggggccaaaccttacgatgggatcccagcccgggagatccctgacctgctggaaaagggggagcggctgccccagccccccatctgcaccattgatgtctacatgatcatggtcaaatgttggatgattgactctgaatgtcggccaagattccgggagttggtgtctgaattctcccgcatggccagggacccccagcgctttgtggtcatccagaatgaggacttgggcccagccagtcccttggacagcaccttctaccgctcactgctggaggacgatgacatgggggacctggtggatgctgaggagtatctggtaccccagcagggcttcttctgtccagaccctgccccgggcgctgggggcatggtccaccacaggcaccgcagctcatctaccaggagtggcggtggggacctgacactagggctggagccctctgaagaggaggcccccaggtctccactggcaccctccgaaggggctggctccgatgtatttgatggtgacctgggaatgggggcagccaaggggctgcaaagcctccccacacatgaccccagccctctacagcggtacagtgaggaccccacagtacccctgccctctgagactgatggctacgttgcccccctgacctgcagcccccagcctgaatatgtgaaccagccagatgttcggccccagcccccttcgccccgagagggccctctgcctgctgcccgacctgctggtgccactctggaaaggcccaagactctctccccagggaagaatggggtcgtcaaagacgtttttgcctttgggggtgccgtggagaaccccgagtacttgacaccccagggaggagctgcccctcagccccaccctcctcctgccttcagcccagccttcgacaacctctattactgggaccaggacccaccagagcggggggctccacccagcaccttcaaagggacacctacggcagagaacccagagtacctgggtctggacgtgccagtgtgaaccagaaggccaagtccgcagaagccctgatgtgtcctcagggagcagggaaggcctgacttctgctggcatcaagaggtgggagggccctccgaccacttccaggggaacctgccatgccaggaacctgtcctaaggaaccttccttcctgcttgagttcccagatggctggaaggggtccagcctcgttggaagaggaacagcactggggagtctttgtggattctgaggccctgcccaatgagactctagggtccagtggatgccacagcccagcttggccctttccttccagatcctgggtactgaaagccttagggaagctggcctgagaggggaagcggccctaagggagtgtctaagaacaaaagcgacccattcagagactgtccctgaaacctagtactgccccccatgaggaaggaacagcaatggtgtcagtatccaggctttgtacagagtgcttttctgtttagtttttactttttttgttttgtttttttaaagatgaaataaagacccagggggagaatgggtgttgtatggggaggcaagtgtggggggtccttctccacacccactttgtccatttgcaaatatattttggaaaacagcta

SEQ ID NO: 56 - DNA, 4817 bp, Homo sapiens
dgttcccggatttttgtgggcgcctgccccgcccctcgtccccctgctgtgtccatatatcgaggcgatagggttaagggaaggcggacgcctgatgggttaatgagcaaactgaagtgttttccatgatcttttttgagtcgcaattgaagtaccacctcccgagggtgattgcttccccatgcggggtagaacctttgctgtcctgttcaccactctacctccagcacagaatttggcttatgcctactcaatgtgaagatgatgaggatgaaaacctttgtgatgatccacttccacttaatgaatggtggcaaagcaaagctatattcaagaccacatgcaaagctactccctgagcaaagagtcacagataaaacgggggcaccagtagaatggccaggacaaacgcagtgcagcacagagactcagaccctggcagccatgcctgcgcaggcagtgatgagagtgacatgtactgttgtggacatgcacaaaagtgagtgtgcaccggcacagacatgaagctgcggctccctgccagtcccgagacccacctggacatgctccgccacctctaccagggctgccaggtggtgcagggaaacctggaactcacctacctgcccaccaatgccagcctgtccttcctgcaggatatccaggaggtgcagggctacgtgctcatcgctcacaaccaagtgaggcaggtcccactgcagaggctgcggattgtgcgaggcacccagctctttgaggacaactatgccctggccgtgctagacaatggagacccgctgaacaataccacccctgtcacaggggcctccccaggaggcctgcgggagctgcagcttcgaagcctcacagagatcttgaaaggaggggtcttgatccagcggaacccccagctctgctaccaggacacgattttgtggaaggacatcttccacaagaacaaccagctggctctcacactgatagacaccaaccgctctcgggcctgccacccctgttctccgatgtgtaagggctcccgctgctggggagagagttctgaggattgtcagagcctgacgcgcactgtctgtgccggtggctgtgcccgctgcaaggggccactgcccactgactgctgccatgagcagtgtgctgccggctgcacgggccccaagcactctgactgcctggcctgcctccacttcaaccacagtggcatctgtgagctgcactgcccagccctggtcacctacaacacagacacgtttgagtccatgcccaatcccgagggccggtatacattcggcgccagctgtgtgactgcctgtccctacaactacctttctacggacgtgggatcctgcaccctcgtctgccccctgcacaaccaagaggtgacagcagaggatggaacacagcggtgtgagaagtgcagcaagccctgtgcccgagtgtgctatggtctgggcatggagcacttgcgagaggtgagggcagttaccagtgccaatatccaggagtttgctggctgcaagaagatctttgggagcctggcatttctgccggagagctttgatggggacccagcctccaacactgccccgctccagccagagcagctccaagtgtttgagactctggaagagatcacaggttacctatacatctcagcatggccggacagcctgcctgacctcagcgtcttccagaacctgcaagtaatccggggacgaattctgcacaatggcgcctactcgctgaccctgcaagggctgggcatcagctggctggggctgcgctcactgagggaactgggcagtggactggccctcatccaccataacacccacctctgcttcgtgcacacggtgccctgggaccagctctttcggaacccgcaccaagctctgctccacactgccaaccggccagaggacgagtgtgtgggcgagggcctggcctgccaccagctgtgcgcccgagggcactgctggggtccagggcccacccagtgtgtcaactgcagccagttccttcggggccaggagtgcgtggaggaatgccgagtactgcaggggctccccagggagtatgtgaatgccaggcactgtttgccgtgccaccctgagtgtcagccccagaatggctcagtgacctgttttggaccggaggctgaccagtgtgtggcctgtgcccactataaggaccctcccttctgcgtggcccgctgccccagcggtgtgaaacctgacctctcctacatgcccatctggaagtttccagatgaggagggcgcatgccagccttgccccatcaactgcacccactcctgtgtggacctggatgacaagggctgccccgccgagcagagagccagccctctgacgtccatcatctctgcggtggttggcattctgctggtcgtggtcttgggggtggtctttgggatcctcatcaagcgacggcagcagaagatccggaagtacacgatgcggagactgctgcaggaaacggagctggtggagccgctgacacctagcggagcgatgcccaaccaggcgcagatgcggatcctgaaagagacggagctgaggaaggtgaaggtgcttggatctggcgcttttggcacagtctacaagggcatctggatccctgatggggagaatgtgaaaattccagtggccatcaaagtgttgagggaaaacacatcccccaaagccaacaaagaaatcttagacgaagcatacgtgatggctggtgtgggctccccatatgtctcccgccttctgggcatctgcctgacatccacggtgcagctggtgacacagcttatgccctatggctgcctcttagaccatgtccgggaaaaccgcggacgcctgggctcccaggacctgctgaactggtgtatgcagattgccaaggggatgagctacctggaggatgtgcggctcgtacacagggacttggccgctcggaacgtgctggtcaagagtcccaaccatgtcaaaattacagacttcgggctggctcggctgctggacattgacgagacagagtaccatgcagatgggggcaaggtgcccatcaagtggatggcgctggagtccattctccgccggcggttcacccaccagagtgatgtgtggagttatggtgtgactgtgtgggagctgatgacttttggggccaaaccttacgatgggatcccagcccgggagatccctgacctgctggaaaagggggagcggctgccccagccccccatctgcaccattgatgtctacatgatcatggtcaaatgttggatgattgactctgaatgtcggccaagattccgggagttggtgtctgaattctcccgcatggccagggacccccagcgctttgtggtcatccagaatgaggacttgggcccagccagtcccttggacagcaccttctaccgctcactgctggaggacgatgacatgggggacctggtggatgctgaggagtatctggtaccccagcagggcttcttctgtccagaccctgccccgggcgctgggggcatggtccaccacaggcaccgcagctcatctaccaggagtggcggtggggacctgacactagggctggagccctctgaagaggaggcccccaggtctccactggcaccctccgaaggggctggctccgatgtatttgatggtgacctgggaatgggggcagccaaggggctgcaaagcctccccacacatgaccccagccctctacagcggtacagtgaggaccccacagtacccctgccctctgagactgatggctacgttgcccccctgacctgcagcccccagcctgaatatgtgaaccagccagatgttcggccccagcccccttcgccccgagagggccctctgcctgctgcccgacctgctggtgccactctggaaaggcccaagactctctccccagggaagaatggggtcgtcaaagacgtttttgcctttgggggtgccgtggagaaccccgagtacttgacaccccagggaggagctgcccctcagccccaccctcctcctgccttcagcccagccttcgacaacctctattactgggaccaggacccaccagagcggggggctccacccagcaccttcaaagggacacctacggcagagaacccagagtacctgggtctggacgtgccagtgtgaaccagaaggccaagtccgcagaagccctgatgtgtcctcagggagcagggaaggcctgacttctgctggcatcaagaggtgggagggccctccgaccacttccaggggaacctgccatgccaggaacctgtcctaaggaaccttccttcctgcttgagttcccagatggctggaaggggtccagcctcgttggaagaggaacagcactggggagtctttgtggattctgaggccctgcccaatgagactctagggtccagtggatgccacagcccagcttggccctttccttccagatcctgggtactgaaagccttagggaagctggcctgagaggggaagcggccctaagggagtgtctaagaacaaaagcgacccattcagagactgtccctgaaacctagtactgccccccatgaggaaggaacagcaatggtgtcagtatccaggctttgtacagagtgcttttctgtttagtttttactttttttgttttgtttttttaaagatgaaataaagacccagggggagaatgggtgttgtatggggaggcaagtgtggggggtccttctccacacccactttgtccatttgcaaatatattttggaaaacagcta

SEQ ID NO: 57 - DNA, 4999 bp, Mus musculus
dcgaggaagtgcggcgtgaagttgtggagctgagattgcccgccgctggggacccggagcccaggagcgccccttcccaggcggccccttccggcgccgcgcctgtgcctgccctcgccgcgccccgcgcccgcagcctggtccagcctgagccatggggccggagccgcagtgatcatcatggagctggcggcctggtgccgttgggggttcctcctcgccctcctgtcccccggagccgcgggtacccaagtgtgtaccggtaccgacatgaagttgcgactccctgccagtcctgagacccacctggacatgcttcgccacctctaccagggctgtcaggtggtgcagggcaatttggagcttacctacctgcccgccaatgccagcctctcattcctgcaggacatccaggaagtccagggatacatgctcatcgctcacaaccgagtgaaacacgtcccactgcagaggttgcgcatcgtgagagggactcagctctttgaggacaagtatgccctggctgtgctagacaaccgagaccctttggacaacgtcaccaccgccgccccaggcagaaccccagaagggctgcgggagctgcagcttcgaagtctcacagagatcttgaagggaggagttttgatccgtgggaaccctcagctctgctaccaggacatggttttgtggaaggatgtcctccgtaagaataaccagctggctcctgtcgacatggacaccaatcgttcccgggcctgtccaccttgtgccccaacctgcaaagacaatcactgttggggtgagagtcctgaagactgtcagatcttgactggcaccatctgtactagtggctgtgcccggtgcaagggccggctgcccactgactgttgccatgagcagtgtgctgcaggctgcacgggtcccaagcattctgactgcctggcctgcctccacttcaatcatagtggtatctgtgagctgcactgcccggccctcatcacctacaacacagacaccttcgagtccatgctcaaccctgagggtcgctacacctttggtgccagctgtgtgaccacctgcccctacaactacctctccacggaagtgggatcctgcactctggtctgtcccccgaacaaccaagaggtcacagctgaggacggaacacagcggtgtgagaaatgcagcaagccctgtgctggagtatgctatggtctgggcatggagcacctccgaggggcgagggccatcaccagtgacaatatccaggagtttgctggctgcaagaagatctttgggagcctggcatttttgccggagagctttgatgggaacccctcctccggcgttgccccactgaagccagagcatctccaagtgttcgaaaccctggaggagatcacaggttacctatacatttcagcatggccagagagcttccaagacctcagtgtcttccagaaccttcgggtcattcggggacggattctccatgatggtgcttactcattgacgttgcaaggcctggggattcactcactggggctacgctcactgcgggagctgggcagtggattggctctcattcaccgcaacacccatctctgctttgtaaacactgtaccttgggaccagctcttccggaacccgcaccaggccctactccacagtgggaaccggccagaagaggcatgtggtcttgagggcttggtctgtaactcactgtgtgcccgtgggcactgctgggggccagggcccacccagtgtgtcaactgcagtcagttcctccggggccaggagtgtgtggaggagtgccgagtatggaaggggctccccagggagtatgtgaggggcaagcactgtctgccatgccaccccgagtgtcagcctcaaaacagctcggagacctgctatggatcggaggctgaccagtgtgaggcttgtgcccactacaaggactcatcttcctgtgtggctcgctgccccagtggtgtgaagccagacctctcctacatgcctatctggaagtacccggatgaggagggcatatgtcagccatgccccatcaactgcacccactcatgtgtggacctggacgaacgaggctgcccagcagagcagagagccagcccagtgacattcatcattgcaactgtggtgggcgtcctgttgttcctgatcatagtggtggtcattggaatcctaatcaaacgaaggcgacagaagatccggaagtataccatgcgtaggctgctgcaggagaccgagctggtggagccgctgacgcccagtggagctgtgcccaaccaggctcagatgcggatcctaaaggagacagagctaaggaagctgaaggtgcttgggtcaggagccttcggcactgtctacaagggcatctggatcccagatggggagaacgtgaaaatccccgtggccatcaaggtgttgagggaaaacacatctcctaaagctaacaaagaaatcctagatgaagcgtacgtcatggctggtgtgggttctccatatgtgtcccgcctcctgggcatctgcctgacatccacagtgcagctggtgacacagcttatgccctatggctgccttctggaccatgtccgagaacaccgaggtcgcttaggctcccaggacctgctcaactggtgtgttcagattgccaaggggatgagctacctggaggaagttcggcttgttcacagggacctagctgcccgaaacgtgctagtcaagagtcccaaccacgtcaagattaccgacttcgggctggcacggctgctggacattgatgagactgaataccatgcagatgggggcaaggtgcccatcaagtggatggcattggaatctattctcagacgccggttcacccatcagagtgatgtgtggagctatggtgtgactgtgtgggagctgatgacctttggggccaaaccttacgatgggatcccagctcgggagatccctgatttgctggagaagggagaacgcctacctcagcctccaatctgcaccatcgacgtctacatgatcatggtcaaatgttggatgattgactccgaatgtcgcccgagattccgggagttggtatcagaattctcccgtatggcaagggacccccagcgctttgtggtcatccagaacgaggacttaggcccctccagccccatggacagcaccttctaccgttcactgctggaggatgatgacatgggggagctggtcgatgctgaagagtacctggtaccccagcagggattcttctccccagaccctgccctaggtactgggagcacagcccaccgcagacaccgcagctcgtcggccaggagtggcggtggtgagctgacactgggcctggagccctcggaagaagagccccccagatctccactggctccctccgaaggggctggctccgatgtgtttgatggtgacctggcagtgggggtaaccaaaggactgcagagcctctctccacatgacctcagccctctacagcggtacagtgaggatcccacattacctctgccccccgagactgatggctacgttgctcccctggcctgcagcccccagcccgagtatgtgaaccagccagaggttcggcctcagtctcccttgaccccagagggtcctccgcctcccatccgacctgctggtgctactctagaaagacccaagactctctctcctgggaaaaatggggttgtcaaagacgtttttgcctttgggggtgctgtggagaaccctgaatacttagcacccagagcaggcactgcctctcagccccacccttctcctgccttcagcccagcctttgacaacctctattactgggaccagaactcatcggagcagggtcctccaccaagtacctttgaagggacccccactgcagagaaccctgagtacctaggcctggatgtgccagtatgaggtcacatgtgcagacatcctctgtcttcagagtggggaaggaaggcctaacttgtggtctccatcgcccgccacaaagcagggagaaggtcctctggccacatgacatccagggcagccggctatgccaggaacgtgccctgaggaacctcgctcgatgcttcaatcctgagtggttaagagggccccgcctggccggaagagacagcacactgttcagccccagaggattacagaccctgactgccctgacagactgtagggtccagtgggtattccttacctggcctggctctcttggttctgaagactgagggaagctcagcctgcaagggaggaggccccaggtgaatatcctgggagcaggacaccccactaggactgaggcacgtgcatcccaagagggggacagcacttgcacccagactggtctttgtacagagtttattttgttctgtttttacttttgttttttgttttttttttaaagatgaaataaggatacagtgggagagtgggtgttatatgaaagtcggggggtgctgtcccctttctccatttgcaatgagatttgtaaaataactggaccccagcctatgtctgagagtggtcccgggccgggtcaaaccgtattgctcatctgacacacagctcctcctggagtgagtgtgtagagatcttccaaaagtttgagacaatttggctttgggcttgagggactggggagttaggattccttctgaaggccctttggcaacagggtcattctccgttggacacactcataccaaggctacccccagaatactccgttggacacactcattccaaggctacccccagaatgaagtcctgtcctcccagtgggagaggggagcttgtggagagcattgccatgtgacttgttttccttgccttagaaagaagtatccatccaggaaaaccccacccactaggtgttagtcccacccactaggtgttagcagggccagactgacctgtgtgccccccgcacaggctggacataaacacacgccagttgacacaa

SEQ ID NO: 58 - DNA, 4728 bp, Rattus novergicus
dgcgccccttcccaggcggccccttccggcgccgcgcctgtgcctgccctcgccgcgccccgcgcccgcagcctggtccagcctgagccatggggccggagccgcaatgatcatcatggagctggcggcctggtgccgctgggggttcctcctcgccctcctgccccccggaatcgcgggcacccaagtgtgtaccggcacagacatgaagttgcggctccctgccagtcctgagacccacctggacatgctccgccacctgtaccagggctgtcaggtagtgcagggcaacttggagcttacctacgtgcctgccaatgccagcctctcattcctgcaggacatccaggaagttcagggttacatgctcatcgctcacaaccaggtgaagcgcgtcccactgcaaaggctgcgcatcgtgagagggacccagctctttgaggacaagtatgccctggctgtgctagacaaccgagatcctcaggacaatgtcgccgcctccaccccaggcagaaccccagaggggctgcgggagctgcagcttcgaagtctcacagagatcctgaagggaggagttttgatccgtgggaaccctcagctctgctaccaggacatggttttgtggaaggacgtcttccgcaagaataaccaactggctcctgtcgatatagacaccaatcgttcccgggcctgtccaccttgtgcccccgcctgcaaagacaatcactgttggggtgagagtccggaagactgtcagatcttgactggcaccatctgtaccagtggttgtgcccggtgcaagggccggctgcccactgactgctgccatgagcagtgtgccgcaggctgcacgggccccaagcattctgactgcctggcctgcctccacttcaatcatagtggtatctgtgagctgcactgcccagccctcgtcacctacaacacagacacctttgagtccatgcacaaccctgagggtcgctacacctttggtgccagctgcgtgaccacctgcccctacaactacctgtctacggaagtgggatcctgcactctggtgtgtcccccgaataaccaagaggtcacagctgaggacggaacacagcgttgtgagaaatgcagcaagccctgtgctcgagtgtgctatggtctgggcatggagcaccttcgaggggcgagggccatcaccagtgacaatgtccaggagtttgatggctgcaagaagatctttgggagcctggcatttttgccggagagctttgatggggacccctcctccggcattgctccgctgaggcctgagcagctccaagtgttcgaaaccctggaggagatcacaggttacctgtacatctcagcatggccagacagtctccgtgacctcagtgtcttccagaaccttcgaatcattcggggacggattctccacgatggcgcgtactcattgacactgcaaggcctggggatccactcgctggggctgcgctcactgcgggagctgggcagtggattggctctgattcaccgcaacgcccatctctgctttgtacacactgtaccttgggaccagctcttccggaacccacatcaggccctgctccacagtgggaaccggccggaagaggattgtggtctcgagggcttggtctgtaactcactgtgtgcccacgggcactgctgggggccagggcccacccagtgtgtcaactgcagtcatttccttcggggccaggagtgtgtggaggagtgccgagtatggaaggggctcccccgggagtatgtgagtgacaagcgctgtctgccgtgtcaccccgagtgtcagcctcaaaacagctcagagacctgctttggatcggaggctgatcagtgtgcagcctgcgcccactacaaggactcgtcctcctgtgtggctcgctgccccagtggtgtgaaaccggacctctcctacatgcccatctggaagtacccggatgaggagggcatatgccagccgtgccccatcaactgcacccactcctgtgtggatctggatgaacgaggctgcccagcagagcagagagccagcccggtgacattcatcattgcaactgtagtgggcgtcctgctgttcctgatcttagtggtggtcgttggaatcctaatcaaacgaaggagacagaagatccggaagtatacgatgcgtaggctgctgcaggaaactgagttagtggagccgctgacgcccagcggagcaatgcccaaccaggctcagatgcggatcctaaaagagacggagctaaggaaggtgaaggtgcttggatcaggagcttttggcactgtctacaagggcatctggatcccagatggggagaatgtgaaaatccccgtggctatcaaggtgttgagagaaaacacatctcctaaagccaacaaagaaattctagatgaagcgtatgtgatggctggtgtgggttctccgtatgtgtcccgcctcctgggcatctgcctgacatccacagtacagctggtgacacagcttatgccctacggctgccttctggaccatgtccgagaacaccgaggtcgcctaggctcccaggacctgctcaactggtgtgttcagattgccaaggggatgagctacctggaggacgtgcggcttgtacacagggacctggctgcccggaatgtgctagtcaagagtcccaaccacgtcaagattacagatttcgggctggctcggctgctggacattgatgagacagagtaccatgcagatgggggcaaggtgcccatcaaatggatggcattggaatctattctcagacgccggttcacccatcagagtgatgtgtggagctatggagtgactgtgtgggagctgatgacttttggggccaaaccttacgatggaatcccagcccgggagatccctgatttgctggagaagggagaacgcctacctcagcctccaatctgcaccattgatgtctacatgattatggtcaaatgttggatgattgactctgaatgtcgcccgagattccgggagttggtgtcagaattttcacgtatggcgagggacccccagcgttttgtggtcatccagaacgaggacttgggcccatccagccccatggacagtaccttctaccgttcactgctggaagatgatgacatgggtgacctggtagacgctgaagagtatctggtgccccagcagggattcttctccccggaccctaccccaggcactgggagcacagcccatagaaggcaccgcagctcgtccaccaggagtggaggtggtgagctgacactgggcctggagccctcggaagaagggccccccagatctccactggctccctcggaaggggctggctccgatgtgtttgatggtgacctggcaatgggggtaaccaaagggctgcagagcctctctccacatgacctcagccctctacagcggtacagcgaggaccccacattacctctgccccccgagactgatggctatgttgctcccctggcctgcagcccccagcccgagtatgtgaaccaatcagaggttcagcctcagcctcctttaaccccagagggtcctctgcctcctgtccggcctgctggtgctactctagaaagacccaagactctctctcctgggaagaatggggttgtcaaagacgtttttgccttcgggggtgctgtggagaaccctgaatacttagtaccgagagaaggcactgcctctccgccccacccttctcctgccttcagcccagcctttgacaacctctattactgggaccagaactcatcggagcaggggcctccaccaagtaactttgaagggacccccactgcagagaaccctgagtacctaggcctggatgtacctgtatgagacgtgtgcagacgtcctgtgctttcagagtggggaaggcctgacttgtggtctccatcgccacaaagcagggagagggtcctctggccacattacatccagggcagacggctctaccaggaacctgccccgaggaacctttccttgctgcttgaatcctgagtggttaagagggccctgcctggctgggagagatggcactggacggcctctggattacagaccctgccctgacagactatagggtccagtgggtatcatggccatggcttcttgcctggcctggctctcttggttctgaggactgaggaaagctcagcctagaagggaagaggtctggagggaacatcctgggaacaggacaagccactaggactgagacacatgcatcccaacagggggctgcactttcatccagaccagtctttgtacagagtgtattttgttctgtttttacttttgcttttttttttaaaaaaagatgaaataaggacacggagggagagtggatgttagggaatggtgtccctctttcttcatttacaatgagatttgtaaaatagctgggccccagcctatgcctgggagtggtcccaggctagaccttactgctcacctgacacacagctcctccttgagttgagtgtgtagaagttttccaaaagtttgagatggtttggctttggggttgagggactgggaagttaggatcctttctgagggccctttggcaacaggatcattcttcattggacgcactcattccaaggctacccctagaatgaagtccttccctcccagtgggagagtggcccttgaaaggagcactgtcacatgactca

SEQ ID NO: 59 - protein, 420 aa, Homo sapiens
PMELAALCRWGLLLALLPPGAASTQVCTGTDMKLRLPASPETHLDMLRHLYQGCQVVQGNLELTYLPTNASLSFLQDIQEVQGYVLIAHNQVRQVPLQRLRIVRGTQLFEDNYALAVLDNGDPLNNTTPVTGASPGGLRELQLRSLTEILKGGVLIQRNPQLCYQDTILWKDIFHKNNQLALTLIDTNRSRACHPCSPMCKGSRCWGESSEDCQSLTRTVCAGGCARCKGPLPTDCCHEQCAAGCTGPKHSDCLACLHFNHSGICELHCPALVTYNTDTFESMPNPEGRYTFGASCVTACPYNYLSTDVGSCTLVCPLHNQEVTAEDGTQRCEKCSKPCARGTHSLPPRPAAVPVPLRMQPGPAHPVLSFLRPSWDLVSAFYSLPLAPLSPTSVPISPVSVGRGPDPDAHVAVDLSRYEG

SEQ ID NO: 60 - protein, 1226 aa, Homo sapiens
PMKLRLPASPETHLDMLRHLYQGCQVVQGNLELTYLPTNASLSFLQDIQEVQGYVLIAHNQVRQVPLQRLRIVRGTQLFEDNYALAVLDNGDPLNNTTPVTGASPGGLRELQLRSLTEILKGGVLIQRNPQLCYQDTILWKDIFHKNNQLALTLIDTNRSRACHPCSPMCKGSRCWGESSEDCQSLTRTVCAGGCARCKGPLPTDCCHEQCAAGCTGPKHSDCLACLHFNHSGICELHCPALVTYNTDTFESMPNPEGRYTFGASCVTACPYNYLSTDVGSCTLVCPLHNQEVTAEDGTQRCEKCSKPCARVCYGLGMEHLREVRAVTSANIQEFAGCKKIFGSLAFLPESFDGDPASNTAPLQPEQLQVFETLEEITGYLYISAWPDSLPDLSVFQNLQVIRGRILHNGAYSLTLQGLGISWLGLRSLRELGSGLALIHHNTHLCFVHTVPWDQLFRNPHQALLHTANRPEDECVGEGLACHQLCARGHCWGPGPTQCVNCSQFLRGQECVEECRVLQGLPREYVNARHCLPCHPECQPQNGSVTCFGPEADQCVACAHYKDPPFCVARCPSGVKPDLSYMPIWKFPDEEGACQPCPINCTHSCVDLDDKGCPAEQRASPLTSIISAVVGILLVVVLGVVFGILIKRRQQKIRKYTMRRLLQETELVEPLTPSGAMPNQAQMRILKETELRKVKVLGSGAFGTVYKGIWIPDGENVKIPVAIKVLRENTSPKANKEILDEAYVMAGVGSPYVSRLLGICLTSTVQLVTQLMPYGCLLDHVRENRGRLGSQDLLNWCMQIAKGMSYLEDVRLVHRDLAARNVLVKSPNHVKITDFGLARLLDIDETEYHADGGKVPIKWMALESILRRRFTHQSDVWSYGVTVWELMTFGAKPYDGIPAREIPDLLEKGERLPQPPICTIDVYMIMVKCWMIDSECRPRFRELVSEFSRMARDPQRFVVIQNEDLGPASPLDSTFYRSLLEDDDMGDLVDAEEYLVPQQGFFCPDPAPGAGGMVHHRHRSSSTRSGGGDLTLGLEPSEEEAPRSPLAPSEGAGSDVFDGDLGMGAAKGLQSLPTHDPSPLQRYSEDPTVPLPSETDGYVAPLTCSPQPEYVNQPDVRPQPPSPREGPLPAARPAGATLERPKTLSPGKNGVVKDVFAFGGAVENPEYLTPQGGAAPQPHPPPAFSPAFDNLYYWDQDPPERGAPPSTFKGTPTAENPEYLGLDVPV

SEQ ID NO: 61 - protein, 1256 aa, Homo sapiens
PMELAALCRWGLLLALLPPGAASTQVCTGTDMKLRLPASPETHLDMLRHLYQGCQVVQGNLELTYLPTNASLSFLQDIQEVQGYVLIAHNQVRQVPLQRLRIVRGTQLFEDNYALAVLDNGDPLNNTTPVTGASPGGLRELQLRSLTEILKGGVLIQRNPQLCYQDTILWKDIFHKNNQLALTLIDTNRSRACHPCSPMCKGSRCWGESSEDCQSLTRTVCAGGCARCKGPLPTDCCHEQCAAGCTGPKHSDCLACLHFNHSGICELHCPALVTYNTDTFESMPNPEGRYTFGASCVTACPYNYLSTDVGSCTLVCPLHNQEVTAEDGTQRCEKCSKPCARVCYGLGMEHLREVRAVTSANIQEFAGCKKIFGSLAFLPESFDGDPASNTAPLQPEQLQVFETLEEITGYLYISAWPDSLPDLSVFQNLQVIRGRILHNGAYSLTLQGLGISWLGLRSLRELGSGLALIHHNTHLCFVHTVPWDQLFRNPHQALLHTANRPEDECVGEGLACHQLCARGHCWGPGPTQCVNCSQFLRGQECVEECRVLQGLPREYVNARHCLPCHPECQPQNGSVTCFGPEADQCVACAHYKDPPFCVARCPSGVKPDLSYMPIWKFPDEEGACQPCPINCTHSCVDLDDKGCPAEQRASPLTSIISAVVGILLVVVLGVVFGILIKRRQQKIRKYTMRRLLQETELVEPLTPSGAMPNQAQMRILKETELRKVKVLGSGAFGTVYKGIWIPDGENVKIPVAIKVLRENTSPKANKEILDEAYVMAGVGSPYVSRLLGICLTSTVQLVTQLMPYGCLLDHVRENRGRLGSQDLLNWCMQIAKGMSYLEDVRLVHRDLAARNVLVKSPNHVKITDFGLARLLDIDETEYHADGGKVPIKWMALESILRRRFTHQSDVWSYGVTVWELMTFGAKPYDGIPAREIPDLLEKGERLPQPPICTIDVYMIMVKCWMIDSECRPRFRELVSEFSRMARDPQRFVVIQNEDLGPASPLDSTFYRSLLEDDDMGDLVDAEEYLVPQQGFFCPDPAPGAGGMVHHRHRSSSTRSGGGDLTLGLEPSEEEAPRSPLAPSEGAGSDVFDGDLGMGAAKGLQSLPTHDPSPLQRYSEDPTVPLPSETDGYVAPLTCSPQPEYVNQPDVRPQPPSPREGPLPAARPAGATLERPKTLSPGKNGVVKDVFAFGGAVENPEYLTPQGGAAPQPHPPPAFSPAFDNLYYWDQDPPERGAPPSTFKGTPTAENPEYLGLDVPV

SEQ ID NO: 62 - protein, 712 aa, Mus musculus
PMELAAWCRWGFLLALLSPGAAGTQVCTGTDMKLRLPASPETHLDMLRHLYQGCQVVQGNLELTYLPANASLSFLQDIQEVQGYMLIAHNRVKHVPLQRLRIVRGTQLFEDKYALAVLDNRDPLDNVTTAAPGRTPEGLRELQLRSLTEILKGGVLIRGNPQLCYQDMVLWKDVLRKNNQLAPVDMDTNRSRACPPCAPTCKDNHCWGESPEDCQILTGTICTSGCARCKGRLPTDCCHEQCAAGCTGPKHSDCLACLHFNHSGICELHCPALITYNTDTFESMLNPEGRYTFGASCVTTCPYNYLSTEVGSCTLVCPPNNQEVTAEDGTQRCEKCSKPCAGVCYGLGMEHLRGARAITSDNIQEFAGCKKIFGSLAFLPESFDGNPSSGVAPLKPEHLQVFETLEEITGYLYISAWPESFQDLSVFQNLRVIRGRILHDGAYSLTLQGLGIHSLGLRSLRELGSGLALIHRNTHLCFVNTVPWDQLFRNPHQALLHSGNRPEEACGLEGLVCNSLCARGHCWGPGPTQCVNCSQFLRGQECVEECRVWKGLPREYVRGKHCLPCHPECQPQNSSETCYGSEADQCEACAHYKDSSSCVARCPSGVKPDLSYMPIWKYPDEEGICQPCPINCTHSCVDLDERGCPAEQRASPVTFIIATVVGVLLFLIIVVVIGILIKRRRQKIRKYTMRRLLQETEVRRAEGLLAPPWLCS

SEQ ID NO: 63 - protein, 520 aa, Mus musculus
PGIWIPDGENVKIPVAIKVLRENTSPKANKEILDEAYVMAGVGSPYVSRLLGICLTSTVQLVTQLMPYGCLLDHVREHRGRLGSQDLLNWCVQIAKGMSYLEEVRLVHRDLAARNVLVKSPNHVKITDFGLARLLDIDETEYHADGGKVPIKWMALESILRRRFTHQSDVWSYGVTVWELMTFGAKPYDGIPAREIPDLLEKGERLPQPPICTIDVYMIMVKCWMIDSECRPRFRELVSEFSRMARDPQRFVVIQNEDLGPSSPMDSTFYRSLLEDDDMGELVDAEEYLVPQQGFFSPDPALGTGSTAHRRHRSSSARSGGGELTLGLEPSEEEPPRSPLAPSEGAGSDVFDGDLAVGVTKGLQSLSPHDLSPLQRYSEDPTLPLPPETDGYVAPLACSPQPEYVNQPEVRPQSPLTPEGPPPPIRPAGATLERPKTLSPGKNGVVKDVFAFGGAVENPEYLAPRAGTASQPHPSPAFSPAFDNLYYWDQNSSEQGPPPSTFEGTPTAENPEYLGLDVPV

SEQ ID NO: 64 - protein, 1257 aa, Mus musculus
PMELAAWCRWGFLLALLSPGAAGTQVCTGTDMKLRLPASPETHLDMLRHLYQGCQVVQGNLELTYLPANASLSFLQDIQEVQGYMLIAHNRVKHVPLQRLRIVRGTQLFEDKYALAVLDNRDPLDNVTTAAPGRTPEGLRELQLRSLTEILKGGVLIRGNPQLCYQDMVLWKDVLRKNNQLAPVDMDTNRSRACPPCAPTCKDNHCWGESPEDCQILTGTICTSGCARCKGRLPTDCCHEQCAAGCTGPKHSDCLACLHFNHSGICELHCPALITYNTDTFESMLNPEGRYTFGASCVTTCPYNYLSTEVGSCTLVCPPNNQEVTAEDGTQRCEKCSKPCAGVCYGLGMEHLRGARAITSDNIQEFAGCKKIFGSLAFLPESFDGNPSSGVAPLKPEHLQVFETLEEITGYLYISAWPESFQDLSVFQNLRVIRGRILHDGAYSLTLQGLGIHSLGLRSLRELGSGLALIHRNTHLCFVNTVPWDQLFRNPHQALLHSGNRPEEACGLEGLVCNSLCARGHCWGPGPTQCVNCSQFLRGQECVEECRVWKGLPREYVRGKHCLPCHPECQPQNSSETCYGSEADQCEACAHYKDSSSCVARCPSGVKPDLSYMPIWKYPDEEGICQPCPINCTHSCVDLDERGCPAEQRASPVTFIIATVVGVLLFLIIVVVIGILIKRRRQKIRKYTMRRLLQETELVEPLTPSGAVPNQAQMRILKETELRKLKVLGSGAFGTVYKGIWIPDGENVKIPVAIKVLRENTSPKANKEILDEAYVMAGVGSPYVSRLLGICLTSTVQLVTQLMPYGCLLDHVREHRGRLGSQDLLNWCVQIAKGMSYLEEVRLVHRDLAARNVLVKSPNHVKITDFGLARLLDIDETEYHADGGKVPIKWMALESILRRRFTHQSDVWSYGVTVWELMTFGAKPYDGIPAREIPDLLEKGERLPQPPICTIDVYMIMVKCWMIDSECRPRFRELVSEFSRMARDPQRFVVIQNEDLGPSSPMDSTFYRSLLEDDDMGELVDAEEYLVPQQGFFSPDPALGTGSTAHRRHRSSSARSGGGELTLGLEPSEEEPPRSPLAPSEGAGSDVFDGDLAVGVTKGLQSLSPHDLSPLQRYSEDPTLPLPPETDGYVAPLACSPQPEYVNQPEVRPQSPLTPEGPPPPIRPAGATLERPKTLSPGKNGVVKDVFAFGGAVENPEYLAPRAGTASQPHPSPAFSPAFDNLYYWDQNSSEQGPPPSTFEGTPTAENPEYLGLDVPV

SEQ ID NO: 65 - protein, 1260 aa, Rattus novergicus
PMIIMELAAWCRWGFLLALLPPGIAGTQVCTGTDMKLRLPASPETHLDMLRHLYQGCQVVQGNLELTYVPANASLSFLQDIQEVQGYMLIAHNQVKRVPLQRLRIVRGTQLFEDKYALAVLDNRDPQDNVAASTPGRTPEGLRELQLRGLTEILKGGVLIRGNPQLCYQDMVLWKDVFRKNNQLAPVDIDTNRSRACPPCAPACKDNHCWGESPEDCQILTGTICTSGCARCKGRLPTDCCHEQCAAGCTGPKHSDCLACLHFNHSGICELHCPALVTYNTDTFESMHNPEGRYTFGASCVTTCPYNYLSTEVGSCTLVCPPNNQEVTAEDGTQRCEKCSKPCARVCYGLGMEHLRGARAITSDNVQEFDGCKKIFGSLAFLPESFDGDPSSGIAPLRPEQLQVFETLEEITGYLYISAWPDSLRDLSVFQNLRIIRGRILHDGAYSLTLQGLGIHSLGLRSLRELGSGLALIHRNAHLCFVHTVPWDQLFRNPHQALLHSGNRPEEDCGLEGLVCNSLCAHGHCWGPGPTQCVNCSHFLRGQECVEECRVWKGLPREYVSDKRCLPCHPECQPQNSSETCFGSEADQCAACAHYKDSSSCVARCPSGVKPDLSYMPIWKYPDEEGICQPCPINCTHSCVDLDERGCPAEQRASPVTFIIATVVGVLLFLILVVVVGILIKRRRQKIRKYTMRRLLQETELVEPLTPSGAMPNQAQMRILKETELRKVKVLGSGAFGTVYKGIWIPDGENVKIPVAIKVLRENTSPKANKEILDEAYVMAGVGSPYVSRLLGICLTSTVQLVTQLMPYGCLLDHVREHRGRLGSQDLLNWCVQIAKGMSYLEDVRLVHRDLAARNVLVKSPNHVKITDFGLARLLDIDETEYHADGGKVPIKWMALESILRRRFTHQSDVWSYGVTVWELMTFGAKPYDGIPAREIPDLLEKGERLPQPPICTIDVYMIMVKCWMIDSECRPRFRELVSEFSRMARDPQRFVVIQNEDLGPSSPMDSTFYRSLLEDDDMGDLVDAEEYLVPQQGFFSPDPTPGTGSTAHRRHRSSSTRSGGGELTLGLEPSEEGPPRSPLAPSEGAGSDVFDGDLAMGVTKGLQSLSPHDLSPLQRYSEDPTLPLPPETDGYVAPLACSPQPEYVNQSEVQPQPPLTPEGPLPPVRPAGATLERPKTLSPGKNGVVKDVFAFGGAVENPEYLVPREGTASPPHPSPAFSPAFDNLYYWDQNSSEQGPPPSNFEGTPTAENPEYLGLDVPV

SEQ ID NO: 66 - protein, 1251 aa, Rattus novergicus
MIIMELAAWCRWGFLLALLPPGIAGTQVCTGTDMKLRLPASPETHLDMLRHLYQGCQVVQGNLELTYVPANASLSFLQDIQEVQGYMLIAHNQVKRVPLQRLRIVRGTQLFEDKYALAVLDNRDPQDNVAASTPGRTPEGLRELQLRSLTEILKGGVLIRGNPQLCYQDMVLWKDVFRKNNQLAPVDIDTNRSRACPPCAPACKDNHCWGESPEDCQILTGTICTSGCARCKGRLPTDCCHEQCAAGCTGPKHSDCLACLHFNHSGICELHCPALVTYNTDTFESMHNPEGRYTFGASCVTTCPYNYLSTEVGSCTLVCPPNNQEVTAEDGTQRCEKCSKPCARVCYGLGMEHLRGARAITSDNVQEFDGCKKIFGSLAFLPESFDGDPSSGIAPLRPEQLQVFETLEEITGYLYISAWPDSLRDLSVFQNLRIIRGRILHDGAYSLTLQGLGIHSLGLRSLRELGSGLALIHRNAHLCFVHTVPWDQLFRNPHQALLHSGNRPEEDCGLEGLVCNSLCAHGHCWGPGPTQCVNCSHFLRGQECVEDREYVSDKRCLPCHPECQPQNSSETCFGSEADQCAACAHYKDSSSCVARCPSGVKPDLSYMPIWKYPDEEGICQPCPINCTHSCVDLDERGCPAEQRASPVTFIIATVVGVLLFLILVVVVGILIKRRRQKIRKYTMRRLLQETELVEPLTPSGAMPNQAQMRILKETELRKVKVLGSGAFGTVYKGIWIPDGENVKIPVAIKVLRENTSPKANKEILDEAYVMAGVGSPYVSRLLGICLTSTVQLVTQLMPYGCLLDHVREHRGRLGSQDLLNWCVQIAKGMSYLEDVRLVHRDLAARNVLVKSPNHVKITDFGLARLLDIDETEYHADGGKVPIKWMALESILRRRFTHQSDVWSYGVTVWELMTFGAKPYDGIPAREIPDLLEKGERLPQPPICTIDVYMIMVKCWMIDSECRPRFRELVSEFSRMARDPQRFVVIQNEDLGPSSPMDSTFYRSLLEDDDMGDLVDAEEYLVPQQGFFSPDPTPGTGSTAHRRHRSSSTRSGGGELTLGLEPSEEGPPRSPLAPSEGAGSDVFDGDLAMGVTKGLQSLSPHDLSPLQRYSEDPTLPLPPETDGYVAPLACSPQPEYVNQSEVQPQPPLTPEGPLPPVRPAGATLERPKTLSPGKNGVVKDVFAFGGAVENPEYLVPREGTASPPHPSPAFSPAFDNLYYWDQNSSEQGPPPSNFEGTPTAENPEYLGLDVPV

SEQ ID NO: 67 - protein, 646 aa, Rattus novergicus
PMPIWKYPDEEGICQPCPINCTHSCVDLDERGCPAEQRASPVTFIIATVVGVLLFLILVVVVGILIKRRRQKIRKYTMRRLLQETELVEPLTPSGAMPNQAQMRILKETELRKVKVLGSGAFGTVYKGIWIPDGENVKIPVAIKVLRENTSPKANKEILDEAYVMAGVGSPYVSRLLGICLTSTVQLVTQLMPYGCLLDHVREHRGRLGSQDLLNWCVQIAKGMSYLEDVRLVHRDLAARNVLVKSPNHVKITDFGLARLLDIDETEYHADGGKVPIKWMALESILRRRFTHQSDVWSYGVTVWELMTFGAKPYDGIPAREIPDLLEKGERLPQPPICTIDVYMIMVKCWMIDSECRPRFRELVSEFSRMARDPQRFVVIQNEDLGPSSPMDSTFYRSLLEDDDMGDLVDAEEYLVPQQGFFSPDPTPGTGSTAHRRHRSSSTRSGGGELTLGLEPSEEGPPRSPLAPSEGAGSDVFDGDLAMGVTKGLQSLSPHDLSPLQRYSEDPTLPLPPETDGYVAPLACSPQPEYVNQSEVQPQPPLTPEGPLPPVRPAGATLERPKTLSPGKNGVVKDVFAFGGAVENPEYLVPREGTASPPHPSPAFSPAFDNLYYWDQNSSEQGPPPSNFEGTPTAENPEYLGLDVPV

SEQ ID NO: 68 - DNA, 2654 bp, Homo sapiens
dctcaaaaggggccggatttccttctcctggaggcagatgttgcctctctctctcgctcggattggttcagtgcactctagaaacactgctgtggtggagaaactggaccccaggtctggagcgaattccagcctgcagggctgataagcgaggcattagtgagattgagagagactttaccccgccgtggtggttggagggcgcgcagtagagcagcagcacaggcgcgggtcccgggaggccggctctgctcgcgccgagatgtggaatctccttcacgaaaccgactcggctgtggccaccgcgcgccgcccgcgctggctgtgcgctggggcgctggtgctggcgggtggcttctttctcctcggcttcctcttcgggtggtttataaaatcctccaatgaagctactaacattactccaaagcataatatgaaagcatttttggatgaattgaaagctgagaacatcaagaagttcttatataattttacacagataccacatttagcaggaacagaacaaaactttcagcttgcaaagcaaattcaatcccagtggaaagaatttggcctggattctgttgagctagcacattatgatgtcctgttgtcctacccaaataagactcatcccaactacatctcaataattaatgaagatggaaatgagattttcaacacatcattatttgaaccacctcctccaggatatgaaaatgtttcggatattgtaccacctttcagtgctttctctcctcaaggaatgccagagggcgatctagtgtatgttaactatgcacgaactgaagacttctttaaattggaacgggacatgaaaatcaattgctctgggaaaattgtaattgccagatatgggaaagttttcagaggaaataaggttaaaaatgcccagctggcaggggccaaaggagtcattctctactccgaccctgctgactactttgctcctggggtgaagtcctatccagatggttggaatcttcctggaggtggtgtccagcgtggaaatatcctaaatctgaatggtgcaggagaccctctcacaccaggttacccagcaaatgaatatgcttataggcgtggaattgcagaggctgttggtcttccaagtattcctgttcatccaattggatactatgatgcacagaagctcctagaaaaaatgggtggctcagcaccaccagatagcagctggagaggaagtctcaaagtgccctacaatgttggacctggctttactggaaacttttctacacaaaaagtcaagatgcacatccactctaccaatgaagtgacaagaatttacaatgtgataggtactctcagaggagcagtggaaccagacagatatgtcattctgggaggtcaccgggactcatgggtgtttggtggtattgaccctcagagtggagcagctgttgttcatgaaattgtgaggagctttggaacactgaaaaaggaagggtggagacctagaagaacaattttgtttgcaagctgggatgcagaagaatttggtcttcttggttctactgagtgggcagaggagaattcaagactccttcaagagcgtggcgtggcttatattaatgctgactcatctatagaaggaaactacactctgagagttgattgtacaccgctgatgtacagcttggtacacaacctaacaaaagagctgaaaagccctgatgaaggctttgaaggcaaatctctttatgaaagttggactaaaaaaagtccttccccagagttcagtggcatgcccaggataagcaaattgggatctggaaatgattttgaggtgttcttccaacgacttggaattgcttcaggcagagcacggtatactaaaaattgggaaacaaacaaattcagcggctatccactgtatcacagtgtctatgaaacatatgagttggtggaaaagttttatgatccaatgtttaaatatcacctcactgtggcccaggttcgaggagggatggtgtttgagctagccaattccatagtgctcccttttgattgtcgagattatgctgtagttttaagaaagtatgctgacaaaatctacagtatttctatgaaacatccacaggaaatgaagacatacagtgtatcatttgattcacttttttctgcagtaaagaattttacagaaattgcttccaagttcagtgagagactccaggactttgacaaaagcaacccaatagtattaagaatgatgaatgatcaactcatgtttctggaaagagcatttattgatccattagggttaccagacaggcctttttataggcatgtcatctatgctccaagcagccacaacaagtatgcaggggagtcattcccaggaatttatgatgctctgtttgatattgaaagcaaagtggacccttccaaggcctggggagaagtgaagagacagatttatgttgcagccttcacagtgcaggcagctgcagagactttgagtgaagtagcctaagaggattctttagagaatccgtattgaatttgtgtggtatgtcactcagaaagaatcgtaatgggtatattgataaattttaaaattggtatatttgaaataaagttgaatattatatataaaaaaaaaaaaaaaaaaa

SEQ ID NO: 69 - DNA, 2561 bp, Homo sapiens
dctcaaaaggggccggatttccttctcctggaggcagatgttgcctctctctctcgctcggattggttcagtgcactctagaaacactgctgtggtggagaaactggaccccaggtctggagcgaattccagcctgcagggctgataagcgaggcattagtgagattgagagagactttaccccgccgtggtggttggagggcgcgcagtagagcagcagcacaggcgcgggtcccgggaggccggctctgctcgcgccgagatgtggaatctccttcacgaaaccgactcggctgtggccaccgcgcgccgcccgcgctggctgtgcgctggggcgctggtgctggcgggtggcttctttctcctcggcttcctcttcgggtggtttataaaatcctccaatgaagctactaacattactccaaagcataatatgaaagcatttttggatgaattgaaagctgagaacatcaagaagttcttatataattttacacagataccacatttagcaggaacagaacaaaactttcagcttgcaaagcaaattcaatcccagtggaaagaatttggcctggattctgttgagctagcacattatgatgtcctgttgtcctacccaaataagactcatcccaactacatctcaataattaatgaagatggaaatgagattttcaacacatcattatttgaaccacctcctccaggatatgaaaatgtttcggatattgtaccacctttcagtgctttctctcctcaaggaatgccagagggcgatctagtgtatgttaactatgcacgaactgaagacttctttaaattggaacgggacatgaaaatcaattgctctgggaaaattgtaattgccagatatgggaaagttttcagaggaaataaggttaaaaatgcccagctggcaggggccaaaggagtcattctctactccgaccctgctgactactttgctcctggggtgaagtcctatccagatggttggaatcttcctggaggtggtgtccagcgtggaaatatcctaaatctgaatggtgcaggagaccctctcacaccaggttacccagcaaatgaatatgcttataggcgtggaattgcagaggctgttggtcttccaagtattcctgttcatccaattggatactatgatgcacagaagctcctagaaaaaatgggtggctcagcaccaccagatagcagctggagaggaagtctcaaagtgccctacaatgttggacctggctttactggaaacttttctacacaaaaagtcaagatgcacatccactctaccaatgaagtgacaagaatttacaatgtgataggtactctcagaggagcagtggaaccagacagatatgtcattctgggaggtcaccgggactcatgggtgtttggtggtattgaccctcagagtggagcagctgttgttcatgaaattgtgaggagctttggaacactgaaaaaggaagggtggagacctagaagaacaattttgtttgcaagctgggatgcagaagaatttggtcttcttggttctactgagtgggcagaggagaattcaagactccttcaagagcgtggcgtggcttatattaatgctgactcatctatagaaggaaactacactctgagagttgattgtacaccgctgatgtacagcttggtacacaacctaacaaaagagctgaaaagccctgatgaaggctttgaaggcaaatctctttatgaaagttggactaaaaaaagtccttccccagagttcagtggcatgcccaggataagcaaattgggatctggaaatgattttgaggtgttcttccaacgacttggaattgcttcaggcagagcacggtatactaaaaattgggaaacaaacaaattcagcggctatccactgtatcacagtgtctatgaaacatatgagttggtggaaaagttttatgatccaatgtttaaatatcacctcactgtggcccaggttcgaggagggatggtgtttgagctagccaattccatagtgctcccttttgattgtcgagattatgctgtagttttaagaaagtatgctgacaaaatctacagtatttctatgaaacatccacaggaaatgaagacatacagtgtatcatttgattcacttttttctgcagtaaagaattttacagaaattgcttccaagttcagtgagagactccaggactttgacaaaagcaagcatgtcatctatgctccaagcagccacaacaagtatgcaggggagtcattcccaggaatttatgatgctctgtttgatattgaaagcaaagtggacccttccaaggcctggggagaagtgaagagacagatttatgttgcagccttcacagtgcaggcagctgcagagactttgagtgaagtagcctaagaggattctttagagaatccgtattgaatttgtgtggtatgtcactcagaaagaatcgtaatgggtatattgataaattttaaaattggtatatttgaaataaagttgaatattatatataaaaaaaaaaaaaaaaaaa

SEQ ID NO: 70 - DNA, 2738 bp, Homo sapiens
dctcaaaaggggccggatttccttctcctggaggcagatgttgcctctctctctcgctcggattggttcagtgcactctagaaacactgctgtggtggagaaactggaccccaggtctggagcgaattccagcctgcagggctgataagcgaggcattagtgagattgagagagactttaccccgccgtggtggttggagggcgcgcagtagagcagcagcacaggcgcgggtcccgggaggccggctctgctcgcgccgagatgtggaatctccttcacgaaaccgactcggctgtggccaccgcgcgccgcccgcgctggctgtgcgctggggcgctggtgctggcgggtggcttctttctcctcggcttcctcttcggttaaaagccaactgcaaggtctaatgactgcaggatctagctatccattgtttctggccgcctatgcgtgcactgggtgtctggcagagaggctggggtggtttataaaatcctccaatgaagctactaacattactccaaagcataatatgaaagcatttttggatgaattgaaagctgagaacatcaagaagttcttatataattttacacagataccacatttagcaggaacagaacaaaactttcagcttgcaaagcaaattcaatcccagtggaaagaatttggcctggattctgttgagctagcacattatgatgtcctgttgtcctacccaaataagactcatcccaactacatctcaataattaatgaagatggaaatgagattttcaacacatcattatttgaaccacctcctccaggatatgaaaatgtttcggatattgtaccacctttcagtgctttctctcctcaaggaatgccagagggcgatctagtgtatgttaactatgcacgaactgaagacttctttaaattggaacgggacatgaaaatcaattgctctgggaaaattgtaattgccagatatgggaaagttttcagaggaaataaggttaaaaatgcccagctggcaggggccaaaggagtcattctctactccgaccctgctgactactttgctcctggggtgaagtcctatccagatggttggaatcttcctggaggtggtgtccagcgtggaaatatcctaaatctgaatggtgcaggagaccctctcacaccaggttacccagcaaatgaatatgcttataggcgtggaattgcagaggctgttggtcttccaagtattcctgttcatccaattggatactatgatgcacagaagctcctagaaaaaatgggtggctcagcaccaccagatagcagctggagaggaagtctcaaagtgccctacaatgttggacctggctttactggaaacttttctacacaaaaagtcaagatgcacatccactctaccaatgaagtgacaagaatttacaatgtgataggtactctcagaggagcagtggaaccagacagatatgtcattctgggaggtcaccgggactcatgggtgtttggtggtattgaccctcagagtggagcagctgttgttcatgaaattgtgaggagctttggaacactgaaaaaggaagggtggagacctagaagaacaattttgtttgcaagctgggatgcagaagaatttggtcttcttggttctactgagtgggcagaggagaattcaagactccttcaagagcgtggcgtggcttatattaatgctgactcatctatagaaggaaactacactctgagagttgattgtacaccgctgatgtacagcttggtacacaacctaacaaaagagctgaaaagccctgatgaaggctttgaaggcaaatctctttatgaaagttggactaaaaaaagtccttccccagagttcagtggcatgcccaggataagcaaattgggatctggaaatgattttgaggtgttcttccaacgacttggaattgcttcaggcagagcacggtatactaaaaattgggaaacaaacaaattcagcggctatccactgtatcacagtgtctatgaaacatatgagttggtggaaaagttttatgatccaatgtttaaatatcacctcactgtggcccaggttcgaggagggatggtgtttgagctagccaattccatagtgctcccttttgattgtcgagattatgctgtagttttaagaaagtatgctgacaaaatctacagtatttctatgaaacatccacaggaaatgaagacatacagtgtatcatttgattcacttttttctgcagtaaagaattttacagaaattgcttccaagttcagtgagagactccaggactttgacaaaagcaacccaatagtattaagaatgatgaatgatcaactcatgtttctggaaagagcatttattgatccattagggttaccagacaggcctttttataggcatgtcatctatgctccaagcagccacaacaagtatgcaggggagtcattcccaggaatttatgatgctctgtttgatattgaaagcaaagtggacccttccaaggcctggggagaagtgaagagacagatttatgttgcagccttcacagtgcaggcagctgcagagactttgagtgaagtagcctaagaggattctttagagaatccgtattgaatttgtgtggtatgtcactcagaaagaatcgtaatgggtatattgataaattttaaaattggtatatttgaaataaagttgaatattatatataaaaaa

SEQ ID NO: 71 - DNA, 2645 bp, Homo sapiens
dctcaaaaggggccggatttccttctcctggaggcagatgttgcctctctctctcgctcggattggttcagtgcactctagaaacactgctgtggtggagaaactggaccccaggtctggagcgaattccagcctgcagggctgataagcgaggcattagtgagattgagagagactttaccccgccgtggtggttggagggcgcgcagtagagcagcagcacaggcgcgggtcccgggaggccggctctgctcgcgccgagatgtggaatctccttcacgaaaccgactcggctgtggccaccgcgcgccgcccgcgctggctgtgcgctggggcgctggtgctggcgggtggcttctttctcctcggcttcctcttcggttaaaagccaactgcaaggtctaatgactgcaggatctagctatccattgtttctggccgcctatgcgtgcactgggtgtctggcagagaggctggggtggtttataaaatcctccaatgaagctactaacattactccaaagcataatatgaaagcatttttggatgaattgaaagctgagaacatcaagaagttcttatataattttacacagataccacatttagcaggaacagaacaaaactttcagcttgcaaagcaaattcaatcccagtggaaagaatttggcctggattctgttgagctagcacattatgatgtcctgttgtcctacccaaataagactcatcccaactacatctcaataattaatgaagatggaaatgagattttcaacacatcattatttgaaccacctcctccaggatatgaaaatgtttcggatattgtaccacctttcagtgctttctctcctcaaggaatgccagagggcgatctagtgtatgttaactatgcacgaactgaagacttctttaaattggaacgggacatgaaaatcaattgctctgggaaaattgtaattgccagatatgggaaagttttcagaggaaataaggttaaaaatgcccagctggcaggggccaaaggagtcattctctactccgaccctgctgactactttgctcctggggtgaagtcctatccagatggttggaatcttcctggaggtggtgtccagcgtggaaatatcctaaatctgaatggtgcaggagaccctctcacaccaggttacccagcaaatgaatatgcttataggcgtggaattgcagaggctgttggtcttccaagtattcctgttcatccaattggatactatgatgcacagaagctcctagaaaaaatgggtggctcagcaccaccagatagcagctggagaggaagtctcaaagtgccctacaatgttggacctggctttactggaaacttttctacacaaaaagtcaagatgcacatccactctaccaatgaagtgacaagaatttacaatgtgataggtactctcagaggagcagtggaaccagacagatatgtcattctgggaggtcaccgggactcatgggtgtttggtggtattgaccctcagagtggagcagctgttgttcatgaaattgtgaggagctttggaacactgaaaaaggaagggtggagacctagaagaacaattttgtttgcaagctgggatgcagaagaatttggtcttcttggttctactgagtgggcagaggagaattcaagactccttcaagagcgtggcgtggcttatattaatgctgactcatctatagaaggaaactacactctgagagttgattgtacaccgctgatgtacagcttggtacacaacctaacaaaagagctgaaaagccctgatgaaggctttgaaggcaaatctctttatgaaagttggactaaaaaaagtccttccccagagttcagtggcatgcccaggataagcaaattgggatctggaaatgattttgaggtgttcttccaacgacttggaattgcttcaggcagagcacggtatactaaaaattgggaaacaaacaaattcagcggctatccactgtatcacagtgtctatgaaacatatgagttggtggaaaagttttatgatccaatgtttaaatatcacctcactgtggcccaggttcgaggagggatggtgtttgagctagccaattccatagtgctcccttttgattgtcgagattatgctgtagttttaagaaagtatgctgacaaaatctacagtatttctatgaaacatccacaggaaatgaagacatacagtgtatcatttgattcacttttttctgcagtaaagaattttacagaaattgcttccaagttcagtgagagactccaggactttgacaaaagcaagcatgtcatctatgctccaagcagccacaacaagtatgcaggggagtcattcccaggaatttatgatgctctgtttgatattgaaagcaaagtggacccttccaaggcctggggagaagtgaagagacagatttatgttgcagccttcacagtgcaggcagctgcagagactttgagtgaagtagcctaagaggattctttagagaatccgtattgaatttgtgtggtatgtcactcagaaagaatcgtaatgggtatattgataaattttaaaattggtatatttgaaataaagttgaatattatatataaaaaa

SEQ ID NO: 72 - DNA, 2267 bp, Homo sapiens
dctcaaaaggggccggatttccttctcctggaggcagatgttgcctctctctctcgctcggattggttcagtgcactctagaaacactgctgtggtggagaaactggaccccaggtctggagcgaattccagcctgcagggctgataagcgaggcattagtgagattgagagagactttaccccgccgtggtggttggagggcgcgcagtagagcagcagcacaggcgcgggtcccgggaggccggctctgctcgcgccgagatgtggaatctccttcacgaaaccgactcggctgtggccaccgcgcgccgcccgcgctggctgtgcgctggggcgctggtgctggcgggtggcttctttctcctcggcttcctcttcgggtggtttataaaatcctccaatgaagctactaacattactccaaagcataatatgaaagcatttttggatgaattgaaagctgagaacatcaagaagttcttataattttcaacacatcattatttgaaccacctcctccaggatatgaaaatgtttcggatattgtaccacctttcagtgctttctctcctcaaggaatgccagagggcgatctagtgtatgttaactatgcacgaactgaagacttctttaaattggaacgggacatgaaaatcaattgctctgggaaaattgtaattgccagatatgggaaagttttcagaggaaataagaatatgcttataggcgtggaattgcagaggctgttggtcttccaagtattcctgttcatccaattggatactatgatgcacagaagctcctagaaaaaatgggtggctcagcaccaccagatagcagctggagaggaagtctcaaagtgccctacaatgttggacctggctttactggaaacttttctacacaaaaagtcaagatgcacatccactctaccaatgaagtgacaagaatttacaatgtgataggtactctcagaggagcagtggaaccagacagatatgtcattctgggaggtcaccgggactcatgggtgtttggtggtattgaccctcagagtggagcagctgttgttcatgaaattgtgaggagctttggaacactgaaaaaggaagggtggagacctagaagaacaattttgtttgcaagctgggatgcagaagaatttggtcttcttggttctactgagtgggcagaggagaattcaagactccttcaagagcgtggcgtggcttatattaatgctgactcatctatagaaggaaactacactctgagagttgattgtacaccgctgatgtacagcttggtacacaacctaacaaaagagctgaaaagccctgatgaaggctttgaaggcaaatctctttatgaaagttggactaaaaaaagtccttccccagagttcagtggcatgcccaggataagcaaattgggatctggaaatgattttgaggtgttcttccaacgacttggaattgcttcaggcagagcacggtatactaaaaattgggaaacaaacaaattcagcggctatccactgtatcacagtgtctatgaaacatatgagttggtggaaaagttttatgatccaatgtttaaatatcacctcactgtggcccaggttcgaggagggatggtgtttgagctagccaattccatagtgctcccttttgattgtcgagattatgctgtagttttaagaaagtatgctgacaaaatctacagtatttctatgaaacatccacaggaaatgaagacatacagtgtatcatttgattcacttttttctgcagtaaagaattttacagaaattgcttccaagttcagtgagagactccaggactttgacaaaagcaacccaatagtattaagaatgatgaatgatcaactcatgtttctggaaagagcatttattgatccattagggttaccagacaggcctttttataggcatgtcatctatgctccaagcagccacaacaagtatgcaggggagtcattcccaggaatttatgatgctctgtttgatattgaaagcaaagtggacccttccaaggcctggggagaagtgaagagacagatttatgttgcagccttcacagtgcaggcagctgcagagactttgagtgaagtagcctaagaggattctttagagaatccgtattgaatttgtgtggtatgtcactcagaaagaatcgtaatgggtatattgataaattttaaaattggtatatttgaaataaagttgaatattatatataaaaaa

SEQ ID NO: 73 - DNA, 3048 bp, Mus musculus
dgacttctatttcccaggggaatagcagtgggaggaaattttaacccgcagaatctctgcagtggatgtagaagagaactgctgaggaaaactaaagttgccagagatgtggaacgcactgcaggacagagactccgcggaggtcctgggacaccgccagcgctggctccgtgttgggacactggtgctggctttaaccggaaccttcctcattggcttcctctttgggtggtttataaaaccttccaatgaagctactggtaatgtttcccattctggcatgaagaaggagtttttgcatgaattgaaggctgagaacatcaaaaaatttttatacaatttcacacggacaccacacttggcaggaacacaaaataattttgagcttgcaaagcaaattcatgaccagtggaaagaatttggcctggatttggttgagttatcccattacgatgtcttgctgtcctatccaaataaaactcatcctaactatatctcaataattaatgaagatggaaatgagattttcaaaacatcattatctgaacagccacccccaggatatgagaatatatcagatgtagtgccaccatacagtgccttctctccacaagggacaccagagggtgatctagtgtatgtcaactatgcacgaactgaagacttctttaaactggaacgggaaatgaagatcagttgttctgggaagattgtgattgccagatatgggaaagtgttcagaggaaatatggttaaaaatgctcaactggcaggggcaaaaggaatgattctgtactcagaccctgctgactactttgttcctgcggtgaagtcctatccagatggctggaacctccctggaggtggtgtccaacgtggaaatgtcttaaatcttaatggtgcaggtgacccgctcacaccaggttacccagcaaatgaacatgcttataggcatgagttgacaaacgctgttggccttccaagtattcctgtccatcctattggatatgatgatgcacagaaactcttagaacacatgggtggtccagcaccccctgacagtagctggaagggaggattaaaagtgccttacaacgtgggacctggctttgctggaaacttttcaacacaaaaggtcaagatgcatattcactcttacactaaagtgacaagaatctataatgtcattggcaccctcaaaggagctctggaaccagacagatatgttattcttggaggtcaccgagatgcttgggtatttggtggcattgaccctcagagtggagcagctgttgttcatgaaattgtgcggagctttggaaccctgaagaagaaaggacggaggcctagaaggacaattttgtttgcaagctgggatgcagaagaatttggccttcttggttctactgagtgggcagaggaacattcaagactcctacaagagcgaggtgtggcttatattaatgctgattcttccatagaaggaaattacactctaagagttgattgcacaccactgatgtacagcttagtgtacaacctaacaaaagagctgcaaagcccagatgaaggttttgaaggaaaatctctttatgacagctggaaagaaaagagtccttcacctgagttcattggaatgcccagaattagcaagctggggtctggcaatgattttgaagtgttcttccaaagacttggaattgcttcaggcagagcccgatatactaaaaattggaaaactaacaaagtcagcagctatcctctctatcacagtgtctatgaaacatatgagctggtagtaaaattttatgacccaacatttaaataccacctcactgtggcccaggttcgaggagcgatggtatttgaacttgccaattctatagtgcttccctttgactgccaaagttatgctgtagctctgaagaagtatgctgacactatctacaatatttcaatgaaacatccacaagaaatgaaggcttacatgatatcatttgattcactgttttctgcagtcaataattttacagatgttgcatctaagttcaatcagagactgcaagagttagacaaaagcaaccccatattactgagaattatgaatgaccagctgatgtatctggaacgtgcattcattgatcctttaggcttaccaggaaggcctttctacaggcatatcatctatgctccaagcagccacaacaagtatgcaggagaatcattccctgggatttatgatgccctttttgatataagtagcaaagtcaatgcttctaaggcctggaacgaagtgaagagacagatttctattgcaacctttacagtgcaagctgcagcagagactctgagggaagtagcttaaacacattctacagaatcacaaaatccctatggaactatggagcttatatatatatatatacacatgcatacatatattcttatttttttcatatgcatcaaaaaatccaaaagtggataatttattttttaaatttcaacatgtattcataaaatttaaaattcaaataagtattaaaactaaggtgaacagtctaataaagtgatacatttgacagtatcagacaattatcagaaatataatacagccttcccagatctactctgtcatttcaataaaaacaagtatcaattccttatggaacacagctggaatagttcacaagtctgcttcatctgggggactagatacactctggccacgaaaggctgggaagatcatattagccacaatagctgacaagttataatctattctcatatcttgtaaaactcagcactctgaattataacgtttaattatttagacttaggaaaatatcattttatgaaaatgtataaaatataaatgcacaaccaataattaatttgtagtcccaataaccatgtacttctaaacaattgcatcatttatatcaaatataatcctggtcttaaattttatgtttatgatttccttgtttatatagaagtcatcaaacatggctgtattcattacatatcttgaatatatacataattttg

SEQ ID NO: 74 - DNA, 2949 bp, Mus musculus
dgacttctatttcccaggggaatagcagtgggaggaaattttaacccgcagaatctctgcagtggatgtagaagagaactgctgaggaaaactaaagttgccagagatgtggaacgcactgcaggacagagactccgcggaggtcctgggacaccgccagcgctggctccgtgttgggacactggtgctggctttaaccggaaccttcctcattggcttcctctttgggtggtttataaaaccttccaatgaagctactggtaatgtttcccattctggcatgaagaaggagtttttgcatgaattgaaggctgagaacatcaaaaaatttttatacaatttcacacggacaccacacttggcaggaacacaaaataattttgagcttgcaaagcaaattcatgaccagtggaaagaatttggcctggatttggttgagttatcccattacgatgtcttgctgtcctatccaaataaaactcatcctaactatatctcaataattaatgaagatggaaatgagattttcaaaacatcattatctgaacagccacccccaggatatgagaatatatcagatgtagtgccaccatacagtgccttctctccacaagggacaccagagggtgatctagtgtatgtcaactatgcacgaactgaagacttctttaaactggaacgggaaatgaagatcagttgttctgggaagattgtgattgccagatatgggaaagtgttcagaggaaatatggttaaaaatgctcaactggcaggggcaaaaggaatgattctgtactcagaccctgctgactactttgttcctgcggtgaagtcctatccagatggctggaacctccctggaggtggtgtccaacgtggaaatgtcttaaatcttaatggtgcaggtgacccgctcacaccaggttacccagcaaatgaacatgcttataggcatgagttgacaaacgctgttggccttccaagtattcctgtccatcctattggatatgatgatgcacagaaactcttagaaaaggtcaagatgcatattcactcttacactaaagtgacaagaatctataatgtcattggcaccctcaaaggagctctggaaccagacagatatgttattcttggaggtcaccgagatgcttgggtatttggtggcattgaccctcagagtggagcagctgttgttcatgaaattgtgcggagctttggaaccctgaagaagaaaggacggaggcctagaaggacaattttgtttgcaagctgggatgcagaagaatttggccttcttggttctactgagtgggcagaggaacattcaagactcctacaagagcgaggtgtggcttatattaatgctgattcttccatagaaggaaattacactctaagagttgattgcacaccactgatgtacagcttagtgtacaacctaacaaaagagctgcaaagcccagatgaaggttttgaaggaaaatctctttatgacagctggaaagaaaagagtccttcacctgagttcattggaatgcccagaattagcaagctggggtctggcaatgattttgaagtgttcttccaaagacttggaattgcttcaggcagagcccgatatactaaaaattggaaaactaacaaagtcagcagctatcctctctatcacagtgtctatgaaacatatgagctggtagtaaaattttatgacccaacatttaaataccacctcactgtggcccaggttcgaggagcgatggtatttgaacttgccaattctatagtgcttccctttgactgccaaagttatgctgtagctctgaagaagtatgctgacactatctacaatatttcaatgaaacatccacaagaaatgaaggcttacatgatatcatttgattcactgttttctgcagtcaataattttacagatgttgcatctaagttcaatcagagactgcaagagttagacaaaagcaaccccatattactgagaattatgaatgaccagctgatgtatctggaacgtgcattcattgatcctttaggcttaccaggaaggcctttctacaggcatatcatctatgctccaagcagccacaacaagtatgcaggagaatcattccctgggatttatgatgccctttttgatataagtagcaaagtcaatgcttctaaggcctggaacgaagtgaagagacagatttctattgcaacctttacagtgcaagctgcagcagagactctgagggaagtagcttaaacacattctacagaatcacaaaatccctatggaactatggagcttatatatatatatatacacatgcatacatatattcttatttttttcatatgcatcaaaaaatccaaaagtggataatttattttttaaatttcaacatgtattcataaaatttaaaattcaaataagtattaaaactaaggtgaacagtctaataaagtgatacatttgacagtatcagacaattatcagaaatataatacagccttcccagatctactctgtcatttcaataaaaacaagtatcaattccttatggaacacagctggaatagttcacaagtctgcttcatctgggggactagatacactctggccacgaaaggctgggaagatcatattagccacaatagctgacaagttataatctattctcatatcttgtaaaactcagcactctgaattataacgtttaattatttagacttaggaaaatatcattttatgaaaatgtataaaatataaatgcacaaccaataattaatttgtagtcccaataaccatgtacttctaaacaattgcatcatttatatcaaatataatcctggtcttaaattttatgtttatgatttccttgtttatatagaagtcatcaaacatggctgtattcattacatatcttgaatatatacataattttg

SEQ ID NO: 75 - DNA, 3012 bp, Rattus novergicus
dtaggctgcagactctctgcagtagagccgcagtagaactgctgagaaagaccaaagttgccagagatgtggaacgctcagcaggacagcgactccgcggaggccctgggacgccgccaacgctggttctgtgctggaacactggtgctggctttcactggaaccttcatcattggcttcctctttgggtggtttataaaaccctccaatgattctactagcagtgtttcctatcctggcatgaagaaggcatttttgcaagaattgaaggctgagaacatcaaaaaatttttatacaatttcacacggacaccacatttggcagggacacaacacaattttgagcttgcaaagcaaattcatgcccagtggaaagaatttggcctggatttggttgagttatctgattatgatgtcctgttgtcctacccaaataagacccatcccaactatatctcaataattaatgaagatggaaatgagattttcaaaacatcattagctgaactgtcacccccgggatatgagaacatatcagatgtagtgccaccatacagtgccttctctccacaagggacaccagagggggatctagtatatgttaactatgcacgaactgaagacttctttaaactggaacgggtcatgaagatcaattgttctgggaagattgtcatcgccagatatgggcaagtgttcagaggaaataaggttaaaaatgctcagctggcaggtgcaaaaggaatcattctgtactcagaccctgctgattactttgttcctggggtgaagtcctatccagatggttggaacctccctggaggtggtgttcagcgtggaaatgtcttaaatcttaatggtgcaggtgatcccctcacaccaggttatccagcaaatgaatatgcctacaggcatgaattcacagaagctgtcggtcttccaagtattcctgtccatccaattggatatgatgatgcacagaaactattagaacatatgggtggctccgcaccccctgacagcagctggaagggaggactaaaagtgccttacaacgtgggacctggctttgctggaaacttttcaaaacaaaaggtcaagctgcatattcactcctacaataaagtgacaagaatctacaatgttattggtaccctcaaaggagctgtggaaccagacagatatgttattcttggagggcacagagatgcttgggtgtttggtggcattgaccctcagagtggagcagctgttgttcatgaaattgtcaggacctttggaactctgaagaagaaaggttggaggcctagaagaactattttgtttgcaagctgggatgctgaagaatttggccttcttggttctactgagtgggcagaggaacattcaagactcttacaagaacgtggtgtggcttatatcaacgctgattcttccatagaaggaaactacactctcagagttgattgcacaccactgatgcacagcttagtatacaacctaacaaaagagctgccaagcccggatgaaggctttgaaggcaaatctctttatgacagctggaaagaaaaaagtccttcaactgagttcattggaatgccaaggattagcaagctggggtctggcaatgattttgaagtgtttttccaaagacttggaattgcttcaggcagagcccggtatactaaaaattggaaaaacaacaaagtcagcagctatcctctctatcacagtgtctatgaaacatacgaattggtagaaaaattctatgatccgacatttaaatatcacctcactgtggcccaggttcgaggagcaatggtatttgaattggccaattctatagtgcttccctttgactgccaaagttatgctgtagctctgaagaaacatgctgagactatctacaacatttcaatgaatcatccacaggagatgaaggcgtacatgatatcatttgattcgctgttttctgcagtaaataattttacagatgttgcatccaagttcaatcagagactgcaagacttagacaagagcaaccccatattactgagaattttgaatgatcagctaatgtatctggaacgtgcattcattgatcctttaggattaccaggaaggcctttctacaggcatatcatctatgctccaagcagccacaacaagtatgcaggagaatcattcccagggatttatgatgccctttttgatattaataacaaagtcgacacttctaaggcctggagagaagtgaagagacagatttctattgcagccttcacagtgcaagctgcagcagagactctgagagaagtagactaagcagtctttacagaattcataaaaaactgatttgtggatcaaaagacaaaagtgaataatttcataatgacttataattttggcatgtattactaaaatttaaaattcaataggtattaaaactaatgtaaacagcctaataaaatgacacatttgacagtattagataattatccgaaatctaatacacccttcccaaatctaccctgtagttttacttcattatggaatacatcttggatagttcacaattctgctctacctgggggcctatatgctctctggtcaccaaaggctgggaggatcattatagtcaccctagcagacgagttctaatttattctctcttcttgtaaacctaattcctctttattgaaaagtttaagtatataggccaaggtcttgtctgtggctccctatggaggatcctgataaaaagcggcagtccatggttttaaggtatttatgatctaaaactctataaattgtaaaagtacaactactaattaacatctatagtctcagtaactgaacttctgaacaaatgcattatttatatgaaatataatcatggtcttgaattttatgtttataatgtctctttttatatagaattacatgtgttttatattcattacatgtcttgaaatatatgtaattttctatttttcattgttatcttctatt

SEQ ID NO: 76 - protein, 751 aa, Homo sapiens
PMWNLLHETDSAVATARRPRWLCAGALVLAGGFFLLGFLFGWFIKSSNEATNITPKHNMKAFLDELKAENIKKFLYNFTQIPHLAGTEQNFQLAKQIQSQWKEFGLDSVELAHYDVLLSYPNKTHPNYISIINEDGNEIFNTSLFEPPPPGYENVSDIVPPFSAFSPQGMPEGDLVYVNYARTEDFFKLERDMKINCSGKIVIARYGKVFRGNKVKNAQLAGAKGVILYSDPADYFAPGVKSYPDGWNLPGGGVQRGNILNLNGAGDPLTPGYPANEYAYRRGIAEAVGLPSIPVHPIGYYDAQKLLEKMGGSAPPDSSWRGSLKVPYNVGPGFTGNFSTQKVKMHIHSTNEVTRIYNVIGTLRGAVEPDRYVILGGHRDSWVFGGIDPQSGAAVVHEIVRSFGTLKKEGWRPRRTILFASWDAEEFGLLGSTEWAEENSRLLQERGVAYINADSSIEGNYTLRVDCTPLMYSLVHNLTKELKSPDEGFEGKSLYESWTKKSPSPEFSGMPRISKLGSGNDFEVFFQRLGIASGRARYTKNWETNKFSGYPLYHSVYETYELVEKFYDPMFKYHLTVAQVRGGMVFELANSIVLPFDCRDYAVVLRKYADKIYSISMKHPQEMKTYSVSFDSLFSAVKNFTEIASKFSERLQDFDKSNPIVLRMMNDQLMFLERAFIDPLGLPDRPFYRHVIYAPSSHNKYAGESFPGIYDALFDIESKVDPSKAWGEVKRQIYVAAFTVQAAAETLSEVA

SEQ ID NO: 77 - protein, 720 aa, Homo sapiens
PMWNLLHETDSAVATARRPRWLCAGALVLAGGFFLLGFLFGWFIKSSNEATNITPKHNMKAFLDELKAENIKKFLYNFTQIPHLAGTEQNFQLAKQIQSQWKEFGLDSVELAHYDVLLSYPNKTHPNYISIINEDGNEIFNTSLFEPPPPGYENVSDIVPPFSAFSPQGMPEGDLVYVNYARTEDFFKLERDMKINCSGKIVIARYGKVFRGNKVKNAQLAGAKGVILYSDPADYFAPGVKSYPDGWNLPGGGVQRGNILNLNGAGDPLTPGYPANEYAYRRGIAEAVGLPSIPVHPIGYYDAQKLLEKMGGSAPPDSSWRGSLKVPYNVGPGFTGNFSTQKVKMHIHSTNEVTRIYNVIGTLRGAVEPDRYVILGGHRDSWVFGGIDPQSGAAVVHEIVRSFGTLKKEGWRPRRTILFASWDAEEFGLLGSTEWAEENSRLLQERGVAYINADSSIEGNYTLRVDCTPLMYSLVHNLTKELKSPDEGFEGKSLYESWTKKSPSPEFSGMPRISKLGSGNDFEVFFQRLGIASGRARYTKNWETNKFSGYPLYHSVYETYELVEKFYDPMFKYHLTVAQVRGGMVFELANSIVLPFDCRDYAVVLRKYADKIYSISMKHPQEMKTYSVSFDSLFSAVKNFTEIASKFSERLQDFDKSKHVIYAPSSHNKYAGESFPGIYDALFDIESKVDPSKAWGEVKRQIYVAAFTVQAAAETLSEVA

SEQ ID NO: 78 - protein, 736 aa, Homo sapiens
PMTAGSSYPLFLAAYACTGCLAERLGWFIKSSNEATNITPKHNMKAFLDELKAENIKKFLYNFTQIPHLAGTEQNFQLAKQIQSQWKEFGLDSVELAHYDVLLSYPNKTHPNYISIINEDGNEIFNTSLFEPPPPGYENVSDIVPPFSAFSPQGMPEGDLVYVNYARTEDFFKLERDMKINCSGKIVIARYGKVFRGNKVKNAQLAGAKGVILYSDPADYFAPGVKSYPDGWNLPGGGVQRGNILNLNGAGDPLTPGYPANEYAYRRGIAEAVGLPSIPVHPIGYYDAQKLLEKMGGSAPPDSSWRGSLKVPYNVGPGFTGNFSTQKVKMHIHSTNEVTRIYNVIGTLRGAVEPDRYVILGGHRDSWVFGGIDPQSGAAVVHEIVRSFGTLKKEGWRPRRTILFASWDAEEFGLLGSTEWAEENSRLLQERGVAYINADSSIEGNYTLRVDCTPLMYSLVHNLTKELKSPDEGFEGKSLYESWTKKSPSPEFSGMPRISKLGSGNDFEVFFQRLGIASGRARYTKNWETNKFSGYPLYHSVYETYELVEKFYDPMFKYHLTVAQVRGGMVFELANSIVLPFDCRDYAVVLRKYADKIYSISMKHPQEMKTYSVSFDSLFSAVKNFTEIASKFSERLQDFDKSNPIVLRMMNDQLMFLERAFIDPLGLPDRPFYRHVIYAPSSHNKYAGESFPGIYDALFDIESKVDPSKAWGEVKRQIYVAAFTVQAAAETLSEVA

SEQ ID NO: 79 - protein, 705 aa, Homo sapiens
PMTAGSSYPLFLAAYACTGCLAERLGWFIKSSNEATNITPKHNMKAFLDELKAENIKKFLYNFTQIPHLAGTEQNFQLAKQIQSQWKEFGLDSVELAHYDVLLSYPNKTHPNYISIINEDGNEIFNTSLFEPPPPGYENVSDIVPPFSAFSPQGMPEGDLVYVNYARTEDFFKLERDMKINCSGKIVIARYGKVFRGNKVKNAQLAGAKGVILYSDPADYFAPGVKSYPDGWNLPGGGVQRGNILNLNGAGDPLTPGYPANEYAYRRGIAEAVGLPSIPVHPIGYYDAQKLLEKMGGSAPPDSSWRGSLKVPYNVGPGFTGNFSTQKVKMHIHSTNEVTRIYNVIGTLRGAVEPDRYVILGGHRDSWVFGGIDPQSGAAVVHEIVRSFGTLKKEGWRPRRTILFASWDAEEFGLLGSTEWAEENSRLLQERGVAYINADSSIEGNYTLRVDCTPLMYSLVHNLTKELKSPDEGFEGKSLYESWTKKSPSPEFSGMPRISKLGSGNDFEVFFQRLGIASGRARYTKNWETNKFSGYPLYHSVYETYELVEKFYDPMFKYHLTVAQVRGGMVFELANSIVLPFDCRDYAVVLRKYADKIYSISMKHPQEMKTYSVSFDSLFSAVKNFTEIASKFSERLQDFDKSKHVIYAPSSHNKYAGESFPGIYDALFDIESKVDPSKAWGEVKRQIYVAAFTVQAAAETLSEVA

SEQ ID NO: 80 - protein, 443 aa, Homo sapiens
PMGGSAPPDSSWRGSLKVPYNVGPGFTGNFSTQKVKMHIHSTNEVTRIYNVIGTLRGAVEPDRYVILGGHRDSWVFGGIDPQSGAAVVHEIVRSFGTLKKEGWRPRRTILFASWDAEEFGLLGSTEWAEENSRLLQERGVAYINADSSIEGNYTLRVDCTPLMYSLVHNLTKELKSPDEGFEGKSLYESWTKKSPSPEFSGMPRISKLGSGNDFEVFFQRLGIASGRARYTKNWETNKFSGYPLYHSVYETYELVEKFYDPMFKYHLTVAQVRGGMVFELANSIVLPFDCRDYAVVLRKYADKIYSISMKHPQEMKTYSVSFDSLFSAVKNFTEIASKFSERLQDFDKSNPIVLRMMNDQLMFLERAFIDPLGLPDRPFYRHVIYAPSSHNKYAGESFPGIYDALFDIESKVDPSKAWGEVKRQIYVAAFTVQAAAETLSEVA

SEQ ID NO: 81 - protein, 753 aa, Mus musculus
PMWNALQDRDSAEVLGHRQRWLRVGTLVLALTGTFLIGFLFGWFIKPSNEATGNVSHSGMKKEFLHELKAENIKKFLYNFTRTPHLAGTQNNFELAKQIHDQWKEFGLDLVELSHYDVLLSYPNKTHPNYISIINEDGNEIFKTSLSEQPPPGYENISDVVPPYSAFSPQGTPEGDLVYVNYARTEDFFKLEREMKISCSGKIVIARYGKVFRGNMVKNAQLAGAKGMILYSDPADYFVPAVKSYPDGWNLPGGGVQRGNVLNLNGAGDPLTPGYPANEHAYRHELTNAVGLPSIPVHPIGYDDAQKLLEHMGGPAPPDSSWKGGLKVPYNVGPGFAGNFSTQKVKMHIHSYTKVTRIYNVIGTLKGALEPDRYVILGGHRDAWVFGGIDPQSGAAVVHEIVRSFGTLKKKGRRPRRTILFASWDAEEFGLLGSTEWAEEHSRLLQERGVAYINADSSIEGNYTLRVDCTPLMYSLVYNLTKELQSPDEGFEGKSLYDSWKEKSPSPEFIGMPRISKLGSGNDFEVFFQRLGIASGRARYTKNWKTNKVSSYPLYHSVYETYELVVKFYDPTFKYHLTVAQVRGAMVFELANSIVLPFDCQSYAVALKKYADTIYNISMKHPQEMKAYMISFDSLFSAVNNFTDVASKFNQRLQELDKSNPILLRIMNDQLMYLERAFIDPLGLPGRPFYRHIIYAPSSHNKYAGESFPGIYDALFDISSKVNASKAWNEVKRQISIATFTVQAAAETLREVA

SEQ ID NO: 82 - protein, 720 aa, Mus musculus
PMWNALQDRDSAEVLGHRQRWLRVGTLVLALTGTFLIGFLFGWFIKPSNEATGNVSHSGMKKEFLHELKAENIKKFLYNFTRTPHLAGTQNNFELAKQIHDQWKEFGLDLVELSHYDVLLSYPNKTHPNYISIINEDGNEIFKTSLSEQPPPGYENISDVVPPYSAFSPQGTPEGDLVYVNYARTEDFFKLEREMKISCSGKIVIARYGKVFRGNMVKNAQLAGAKGMILYSDPADYFVPAVKSYPDGWNLPGGGVQRGNVLNLNGAGDPLTPGYPANEHAYRHELTNAVGLPSIPVHPIGYDDAQKLLEKVKMHIHSYTKVTRIYNVIGTLKGALEPDRYVILGGHRDAWVFGGIDPQSGAAVVHEIVRSFGTLKKKGRRPRRTILFASWDAEEFGLLGSTEWAEEHSRLLQERGVAYINADSSIEGNYTLRVDCTPLMYSLVYNLTKELQSPDEGFEGKSLYDSWKEKSPSPEFIGMPRISKLGSGNDFEVFFQRLGIASGRARYTKNWKTNKVSSYPLYHSVYETYELVVKFYDPTFKYHLTVAQVRGAMVFELANSIVLPFDCQSYAVALKKYADTIYNISMKHPQEMKAYMISFDSLFSAVNNFTDVASKFNQRLQELDKSNPILLRIMNDQLMYLERAFIDPLGLPGRPFYRHIIYAPSSHNKYAGESFPGIYDALFDISSKVNASKAWNEVKRQISIATFTVQAAAETLREVA

SEQ ID NO: 83 - protein, 753 aa, Rattus novergicus
PMWNAQQDSDSAEALGRRQRWFCAGTLVLAFTGTFIIGFLFGWFIKPSNDSTSSVSYPGMKKAFLQELKAENIKKFLYNFTRTPHLAGTQHNFELAKQIHAQWKEFGLDLVELSDYDVLLSYPNKTHPNYISIINEDGNEIFKTSLAELSPPGYENISDVVPPYSAFSPQGTPEGDLVYVNYARTEDFFKLERVMKINCSGKIVIARYGQVFRGNKVKNAQLAGAKGIILYSDPADYFVPGVKSYPDGWNLPGGGVQRGNVLNLNGAGDPLTPGYPANEYAYRHEFTEAVGLPSIPVHPIGYDDAQKLLEHMGGSAPPDSSWKGGLKVPYNVGPGFAGNFSKQKVKLHIHSYNKVTRIYNVIGTLKGAVEPDRYVILGGHRDAWVFGGIDPQSGAAVVHEIVRTFGTLKKKGWRPRRTILFASWDAEEFGLLGSTEWAEEHSRLLQERGVAYINADSSIEGNYTLRVDCTPLMHSLVYNLTKELPSPDEGFEGKSLYDSWKEKSPSTEFIGMPRISKLGSGNDFEVFFQRLGIASGRARYTKNWKNNKVSSYPLYHSVYETYELVEKFYDPTFKYHLTVAQVRGAMVFELANSIVLPFDCQSYAVALKKHAETIYNISMNHPQEMKAYMISFDSLFSAVNNFTDVASKFNQRLQDLDKSNPILLRILNDQLMYLERAFIDPLGLPGRPFYRHIIYAPSSHNKYAGESFPGIYDALFDINNKVDTSKAWREVKRQISIAAFTVQAAAETLREVD

SEQ ID NO: 84 - protein, 470 aa, Rattus novergicus
PEFTEAVGLPSIPVHPIGYDDAQKLLEHMGGSAPPDSSWKGGLKVPYNVGPGFAGNFSKQKVKLHIHSYNKVTRIYNVIGTLKGAVEPDRYVILGGHRDAWVFGGIDPQSGAAVVHEIVRTFGTLKKKGWRPRRTILFASWDAEEFGLLGSTEWAEEHSRLLQERGVAYINADSSIEGNYTLRVDCTPLMHSLVYNLTKELPSPDEGFEGKSLYDSWKEKSPSTEFIGMPRISKLGSGNDFEVFFQRLGIASGRARYTKNWKNNKVSSYPLYHSVYETYELVEKFYDPTFKYHLTVAQVRGAMVFELANSIVLPFDCQSYAVALKKHAETIYNISMNHPQEMKAYMISFDSLFSAVNNFTDVASKFNQRLQDLDKSNPILLRILNDQLMYLERAFIDPLGLPGRPFYRHIIYAPSSHNKYAGESFPGIYDALFDINNKVDTSKAWREVKRQISIAAFTVQAAAETLREVD

SEQ ID NO: 85 - DNA, 941 bp, Homo sapiens
dctgtcagctgaggatccagccgaaagaggagccaggcactcaggccacctgagtctactcacctggacaactggaatctggcaccaattctaaaccactcagcttctccgagctcacaccccggagatcacctgaggacccgagccattgatggactcggacgagaccgggttcgagcactcaggactgtgggtttctgtgctggctggtcttctgctgggagcctgccaggcacaccccatccctgactccagtcctctcctgcaattcgggggccaagtccggcagcggtacctctacacagatgatgcccagcagacagaagcccacctggagatcagggaggatgggacggtggggggcgctgctgaccagagccccgaaagtctcctgcagctgaaagccttgaagccgggagttattcaaatcttgggagtcaagacatccaggttcctgtgccagcggccagatggggccctgtatggatcgctccactttgaccctgaggcctgcagcttccgggagctgcttcttgaggacggatacaatgtttaccagtccgaagcccacggcctcccgctgcacctgccagggaacaagtccccacaccgggaccctgcaccccgaggaccagctcgcttcctgccactaccaggcctgccccccgcactcccggagccacccggaatcctggccccccagccccccgatgtgggctcctcggaccctctgagcatggtgggaccttcccagggccgaagccccagctacgcttcctgaagccagaggctgtttactatgacatctcctctttatttattaggttatttatcttatttatttttttatttttcttacttgagataataaagagttccagaggagaaaaaaaaaaaaaaaaaaaaaaaaaaaaaaaaaaaaaaaaaaaaaaaaaaaaaaa

SEQ ID NO: 86 - DNA, 948 bp, Mus musculus
dagacagccttagtgtcttctcagctggggattcaacacaggagaaacagccattcactttgcctgagccccagtctgaacctgacccatccctgctgggcaccggagtcagaacacaattccagctgccttggctcctcagccgctcgcttgccaggggctctcccgaacggagcgcagccctgatggaatggatgagatctagagttgggaccctgggactgtgggtccgactgctgctggctgtcttcctgctgggggtctaccaagcataccccatccctgactccagccccctcctccagtttgggggtcaagtccggcagaggtacctctacacagatgacgaccaagacactgaagcccacctggagatcagggaggatggaacagtggtaggcgcagcacaccgcagtccagaaagtctcctggagctcaaagccttgaagccaggggtcattcaaatcctgggtgtcaaagcctctaggtttctttgccaacagccagatggagctctctatggatcgcctcactttgatcctgaggcctgcagcttcagagaactgctgctggaggacggttacaatgtgtaccagtctgaagcccatggcctgcccctgcgtctgcctcagaaggactccccaaaccaggatgcaacatcctggggacctgtgcgcttcctgcccatgccaggcctgctccacgagccccaagaccaagcaggattcctgcccccagagcccccagatgtgggctcctctgaccccctgagcatggtagagcctttacagggccgaagccccagctatgcgtcctgactcttcctgaatctagggctgtttctttttgggtttccacttatttattacgggtatttatcttatttatttattttagtttttttttcttacttggaataataaagagtctgaaagaaaaatgtgtgtt

SEQ ID NO: 87 - DNA, 628 bp, Rattus novergicus
datggactggatgaaatctagagttggggccccgggactgtgggtctgtctcctgctgcctgtcttcctgctgggggtgtgcgaggcataccccatctctgactccagccccctcctccagtttgggggtcaagtccgacagaggtatctctacacagatgacgaccaggacaccgaagcccacctggagatcagggaggacggaacagtggtgggcacagcacaccgcagtccagaaagtctcctggagctcaaagccttgaagccaggggtcattcaaatcctgggtgtcaaagcctctaggtttctttgccaacaaccagatggaactctctatggatcgcctcactttgatcctgaggcctgcagtttcagagagctgctgcttaaggacggatacaatgtgtaccagtctgaggcccatggcctgcccctgcgtctgccccagaaggactcccaggatccagcaacccggggacctgtgcgcttcctgcccatgccaggcctgccccacgagccccaagagcaaccaggagtccttcccccagagcccccagatgtgggttcctccgaccccctgagcatggtagagcctttgcaaggccgaagccccagctatgcatcttga

SEQ ID NO: 88 - protein, 241 aa, Homo sapiens
DMDSDETGFEHSGLWVSVLAGLLLGACQAHPIPDSSPLLQFGGQVRQRYLYTDDAQQTEAHLEIREDGTVGGAADQSPESLLQLKALKPGVIQILGVKTSRFLCQRPDGALYGSLHFDPEACSFRELLLEDGYNVYQSEAHGLPLHLPGNKSPHRDPAPRGPARFLPLPGLPPAPPEPPGILAPQPPDVGSSDPLSMVVQDELQGVGGEGCHMHPENCKTLLTDIDRTHTEKPVWDGITGE

SEQ ID NO: 89 - protein, 210 aa, Homo sapiens
PMDSDETGFEHSGLWVSVLAGLLLGACQAHPIPDSSPLLQFGGQVRQRYLYTDDAQQTEAHLEIREDGTVGGAADQSPESLLQLKALKPGVIQILGVKTSRFLCQRPDGALYGSLHFDPEACSFRELLLEDGYNVYQSEAHGLPLHLPGNKSPHRDPAPRGPARFLPLPGLPPAPPEPPGILAPQPPDVGSSDPLSMVGPSQGRSPSYAS

SEQ ID NO: 90 - protein, 211 aa, Mus musculus
PMEWMRSRVGTLGLWVRLLLAVFLLGVYQAYPIPDSSPLLQFGGQVRQRYLYTDDDQDTEAHLEIREDGTVVGAAHRSPESLLELKALKPGVIQILGVKASRFLCQQPDGALYGSPHFDPEACSFRELLLEDGYNVYQSEAHGLPLRLPQKDSPNQDATSWGPVRFLPMPGLLHEPQDQAGFLPPEPPDVGSSDPLSMVEPLQGRSPSYAS

SEQ ID NO: 91 - protein, 209 aa, Rattus novergicus
PMDWMKSRVGAPGLWVCLLLPVFLLGVCEAYPISDSSPLLQFGGQVRQRYLYTDDDQDTEAHLEIREDGTVVGTAHRSPESLLELKALKPGVIQILGVKASRFLCQQPDGTLYGSPHFDPEACSFRELLLKDGYNVYQSEAHGLPLRLPQKDSQDPATRGPVRFLPMPGLPHEPQEQPGVLPPEPPDVGSSDPLSMVEPLQGRSPSYAS

SEQ ID NO: 92 - DNA, 6080 bp, Homo sapiens
datcctcagtctcccagttcaagctaatcattgacagagctttacaatcacaagcttttactgaagctttgataagacagtccagcagttggtggcaaatgaagccaggctgtgcggcaggatctccagggaatgaatggattttcttcagcactgatgaaataaccacacgctataggaatacaatgtccaacgggggattgcaaagatctgtcatcctgtcagcacttattctgctacgagctgttactggattctctggagatggaagagctatatggtctaaaaatcctaattttactccggtaaatgaaagtcagctgtttctctatgacactttccctaaaaactttttctggggtattgggactggagcattgcaagtggaagggagttggaagaaggatggaaaaggaccttctatatgggatcatttcatccacacacaccttaaaaatgtcagcagcacgaatggttccagtgacagttatatttttctggaaaaagacttatcagccctggattttataggagtttctttttatcaattttcaatttcctggccaaggcttttccccgatggaatagtaacagttgccaacgcaaaaggtctgcagtactacagtactcttctggacgctctagtgcttagaaacattgaacctatagttactttataccactgggatttgcctttggcactacaagaaaaatatggggggtggaaaaatgataccataatagatatcttcaatgactatgccacatactgtttccagatgtttggggaccgtgtcaaatattggattacaattcacaacccatatctagtggcttggcatgggtatgggacaggtatgcatgcccctggagagaagggaaatttagcagctgtctacactgtgggacacaacttgatcaaggctcactcgaaagtttggcataactacaacacacatttccgcccacatcagaagggttggttatcgatcacgttgggatctcattggatcgagccaaaccggtcggaaaacacgatggatatattcaaatgtcaacaatccatggtttctgtgcttggatggtttgccaaccctatccatggggatggcgactatccagaggggatgagaaagaagttgttctccgttctacccattttctctgaagcagagaagcatgagatgagaggcacagctgatttctttgccttttcttttggacccaacaacttcaagcccctaaacaccatggctaaaatgggacaaaatgtttcacttaatttaagagaagcgctgaactggattaaactggaatacaacaaccctcgaatcttgattgctgagaatggctggttcacagacagtcgtgtgaaaacagaagacaccacggccatctacatgatgaagaatttcctcagccaggtgcttcaagcaataaggttagatgaaatacgagtgtttggttatactgcctggtctctcctggatggctttgaatggcaggatgcttacaccatccgccgaggattattttatgtggattttaacagtaaacagaaagagcggaaacctaagtcttcagcacactactacaaacagatcatacgagaaaatggtttttctttaaaagagtccacgccagatgtgcagggccagtttccctgtgacttctcctggggtgtcactgaatctgttcttaagcccgagtctgtggcttcgtccccacagttcagcgatcctcatctgtacgtgtggaacgccactggcaacagactgttgcaccgagtggaaggggtgaggctgaaaacacgacccgctcaatgcacagattttgtaaacatcaaaaaacaacttgagatgttggcaagaatgaaagtcacccactaccggtttgctctggattgggcctcggtccttcccactggcaacctgtccgcggtgaaccgacaggccctgaggtactacaggtgcgtggtcagtgaggggctgaagcttggcatctccgcgatggtcaccctgtattatccgacccacgcccacctaggcctccccgagcctctgttgcatgccgacgggtggctgaacccatcgacggccgaggccttccaggcctacgctgggctgtgcttccaggagctgggggacctggtgaagctctggatcaccatcaacgagcctaaccggctaagtgacatctacaaccgctctggcaacgacacctacggggcggcgcacaacctgctggtggcccacgccctggcctggcgcctctacgaccggcagttcaggccctcacagcgcggggccgtgtcgctgtcgctgcacgcggactgggcggaacccgccaacccctatgctgactcgcactggagggcggccgagcgcttcctgcagttcgagatcgcctggttcgccgagccgctcttcaagaccggggactaccccgcggccatgagggaatacattgcctccaagcaccgacgggggctttccagctcggccctgccgcgcctcaccgaggccgaaaggaggctgctcaagggcacggtcgacttctgcgcgctcaaccacttcaccactaggttcgtgatgcacgagcagctggccggcagccgctacgactcggacagggacatccagtttctgcaggacatcacccgcctgagctcccccacgcgcctggctgtgattccctggggggtgcgcaagctgctgcggtgggtccggaggaactacggcgacatggacatttacatcaccgccagtggcatcgacgaccaggctctggaggatgaccggctccggaagtactacctagggaagtaccttcaggaggtgctgaaagcatacctgattgataaagtcagaatcaaaggctattatgcattcaaactggctgaagagaaatctaaacccagatttggattcttcacatctgattttaaagctaaatcctcaatacaattttacaacaaagtgatcagcagcaggggcttcccttttgagaacagtagttctagatgcagtcagacccaagaaaatacagagtgcactgtctgcttattccttgtgcagaagaaaccactgatattcctgggttgttgcttcttctccaccctggttctactcttatcaattgccatttttcaaaggcagaagagaagaaagttttggaaagcaaaaaacttacaacacataccattaaagaaaggcaagagagttgttagctaaactgatctgtctgcatgatagacagtttaaaaattcatcccagttccatatgctggtaacttacaggagatatacctgtattatagaaagacaatctgagatacagctgtaaccaaggtgatgacaattgtctctgctgtgtggttcaaagaacattcccttaggtgttgacatcagtgaactcagttcttggatgtaaacataaaggcttcatcctgacagtaagctatgaggattacatgctacattgcttcttaaagtttcatcaactgtattccatcattctgctttagctttcatctctaccaatagctacttgtggtacaataaattatttttaagaagtaaaactctggggctggacgctgtggctcacacctgtaatctcagcactttgggaggccgaggcggggagatcacctgaggtgaggagttcgagaccagcctggccaacatggtgaaaccatgtctctactaaaaatacaaaaaattagccaggcgtggtgacagtggcacctgtaatcccagctacttgggaggctgaggcagaagtttgaacccaggaaacaggttacagtaggccaaaattgcgccactgcactccagcctaggcgacaacagcaagactgtgtccaaaaaaaaaaaaaaaagcaaaagcaaaactttgttttgttagactctacagcagagatttaacacccttctttaaactgggtagtcagtgatagataatatatattctgtcacttctaataaggtgccttctcctttaggtcagggtggttctaaaatggaaagaaaacacaatagggtaagtagtgcttgtctaagccagttacaacacagactcttaaagaggatcaagcccttcatttttctaacaacaaaaaatcacctatagaatatctaatttgtgatcttttactagatctgattttttaaaataatgtaatttccggccaggcacggtggcaccgcctgtaatcccagcactttgggaggccaaggcaggtggatcacctgaggttaggagttcgagactagcctggccaacatggcaaaaccccatctctactaaaaatacaaaagttagccgggcatggtggtgggcacctgtaatcccagctactcaggaggccgaggcaggagaatcgcttgaacccgagaggcagaggttgcaatgagccaagatcgtgccattgcactccagcctgggggacagggcaagactgtctctcaaaataaaaaaaaataataaaaataaaaataaaagtaatttccaaaacctcatctcatggaaagatcacaggatgaaggaaagctagactcaactctgtgaatagaagttgctatactgtaagtaaagcaacaattcagaatactgaatgagtttaaattgttttatatagcacccttttgggctagggttaattactagatctgacttggataatttgacactttgggaaatgaactctgttcttgagacttgttcagtgtattttaaacatctgaggaagaaaacttaaatatgcacctatttatacctattctttctttaggtcaacatttaacacccactgcatacattaatttgtccttgtctgctcactccagcaatttagaccttaacagtcacaagagacgttcttctgttacaaagccttagtaaattaaggcagttttgattatattctaggtccacctatgtctgaagctaaattcagtatctaactgctaatgaacaagtttccaaaatactgtaaaaatacaattagtcaatttgagtaaatgcaaatatgatgagaaatcaatttgctatttggcctggcaaatgggaacagtaaaattctgctttactcttctctagtctccttgccccagctgcacccactaccccaaagttggcagttttgaggtatgattttcaaggaatttttttagtattaacatctccctctgagaactatgtacctaaggtcacgcatacaactagtcaattctgtttttattactctaactatgtagaaacagtaagtcacttaaaacaatcacttggctgggttttttcccctttgtgccacattgattcaccctgacccaagaactccagggaaaattctttaatgtcaactgggcaactcattaacctctctttaacatcaagggcttgggaaaaaaaaaaaaaaggttagccacaggaataacaaaaacctggaatttatctttcaggttttgctttctctttctcactttgtttaaagtatctcgtactcacagttcacaaattaaccttcactgtctctttcacattaagagcttatgcttaaagcatgccccccttttctaacttgctggtttaccataaactcccctaagtaataaaattcctaacccagtactgagagtcctccttctctgccacttgggcattattttactagtttttaagccatcatcgcacaagaatccaaaaacccttaaattttttaaccactggcaaatatgtacagcaaattaggttaagcatttaatctggctcatgctctatcatactaaatattcaggtttatcataaactccttaaaaaccatcaaaggtcaaccagaaactgataactcttgaaaggagcaaacaggtaagatctttggagtttaagcttttctgagatgtgttgtgaaaaatctaacgtgtttatcgtatattcaatgtaacaacctggagaatcacaactatatttaaagagcctctggaaaatgaggccagtacagtgtgactacatgtttaattttcaatgtaatttattccaaataaactggttcatgctgaccacttgtattcaactaa

SEQ ID NO: 93 - DNA, 3440 bp, Mus musculus
daatgaagacaggctgtgcagcagggtctccggggaatgaatggattttcttcagctctgatgaaagaaacacacgctctaggaaaacaatgtccaacagggcactgcaaagatctgccgtgctgtctgcgtttgttctgctgcgagctgttaccggcttctccggagacgggaaagcaatatgggataaaaaacagtacgtgagtccggtaaacccaagtcagctgttcctctatgacactttccctaaaaacttttcctggggcgttgggaccggagcatttcaagtggaagggagttggaagacagatggaagaggaccctcgatctgggatcggtacgtctactcacacctgagaggtgtcaacggcacagacagatccactgacagttacatctttctggaaaaagacttgttggctctggattttttaggagtttctttttatcagttctcaatctcctggccacggttgtttcccaatggaacagtagcagcagtgaatgcgcaaggtctccggtactaccgtgcacttctggactcgctggtacttaggaatatcgagcccattgttaccttgtaccattgggatttgcctctgacgctccaggaagaatatgggggctggaaaaatgcaactatgatagatctcttcaacgactatgccacatactgcttccagacctttggagaccgtgtcaaatattggattacaattcacaacccttaccttgttgcttggcatgggtttggcacaggtatgcatgcaccaggagagaagggaaatttaacagctgtctacactgtgggacacaacctgatcaaggcacattcgaaagtgtggcataactacgacaaaaacttccgccctcatcagaagggttggctctccatcaccttggggtcccattggatagagccaaacagaacagacaacatggaggacgtgatcaactgccagcactccatgtcctctgtgcttggatggttcgccaaccccatccacggggacggcgactaccctgagttcatgaagacgggcgccatgatccccgagttctctgaggcagagaaggaggaggtgaggggcacggctgatttctttgccttttccttcgggcccaacaacttcaggccctcaaacaccgtggtgaaaatgggacaaaatgtatcactcaacttaaggcaggtgctgaactggattaaactggaatacgatgaccctcaaatcttgatttcggagaacggctggttcacagatagctatataaagacagaggacaccacggccatctacatgatgaagaatttcctaaaccaggttcttcaagcaataaaatttgatgaaatccgcgtgtttggttatacggcctggactctcctggatggctttgagtggcaggatgcctatacgacccgacgagggctgttttatgtggactttaacagtgagcagaaagagaggaaacccaagtcctcggctcattactacaagcagatcatacaagacaacggcttccctttgaaagagtccacgccagacatgaagggtcggttcccctgtgatttctcttggggagtcactgagtctgttcttaagcccgagtttacggtctcctccccgcagtttaccgatcctcacctgtatgtgtggaatgtcactggcaacagattgctctaccgagtggaaggggtaaggctgaaaacaagaccatcccagtgcacagattatgtgagcatcaaaaaacgagttgaaatgttggcaaaaatgaaagtcacccactaccagtttgctctggactggacctctatccttcccactggcaatctgtccaaagttaacagacaagtgttaaggtactataggtgtgtggtgagcgaaggactgaagctgggcgtcttccccatggtgacgttgtaccacccaacccactcccatctcggcctccccctgccacttctgagcagtggggggtggctaaacatgaacacagccaaggccttccaggactacgctgagctgtgcttccgggagttgggggacttggtgaagctctggatcaccatcaatgagcctaacaggctgagtgacatgtacaaccgcacgagtaatgacacctaccgtgcagcccacaacctgatgatcgcccatgcccaggtctggcacctctatgataggcagtataggccggtccagcatggggctgtgtcgctgtccttacattgcgactgggcagaacctgccaacccctttgtggattcacactggaaggcagccgagcgcttcctccagtttgagatcgcctggtttgcagatccgctcttcaagactggcgactatccatcggttatgaaggaatacatcgcctccaagaaccagcgagggctgtctagctcagtcctgccgcgcttcaccgcgaaggagagcaggctggtgaagggtaccgtcgacttctacgcactgaaccacttcactacgaggttcgtgatacacaagcagctgaacaccaaccgctcagttgcagacagggacgtccagttcctgcaggacatcacccgcctaagctcgcccagccgcctggctgtaacaccctggggagtgcgcaagctccttgcgtggatccggaggaactacagagacagggatatctacatcacagccaatggcatcgatgacctggctctagaggatgatcagatccgaaagtactacttggagaagtatgtccaggaggctctgaaagcatatctcattgacaaggtcaaaatcaaaggctactatgcattcaaactgactgaagagaaatctaagcctagatttggatttttcacctctgacttcagagctaagtcctctgtccagttttacagcaagctgatcagcagcagtggcctccccgctgagaacagaagtcctgcgtgtggtcagcctgcggaagacacagactgcaccatttgctcatttctcgtggagaagaaaccactcatcttcttcggttgctgcttcatctccactctggctgtactgctatccatcaccgtttttcatcatcaaaagagaagaaaattccagaaagcaaggaacttacaaaatataccattgaagaaaggccacagcagagttttcagctaaactgccatttctgtcatagtttcaagattcactccggctccatgtactggtaacttacgatgtgagagacagctgtaaccaaggtgaagacaatcgatgcctctgaagtgtggttcaaataattccttcaggtcccgacaatcagtgagtccgttctccgagctgaagacaccctgacagtaactctgggcgtgaccctaaacatcgcttcaggaagtgtgaatcacgacttcacatcctttttctctagcattcttctgtaaataacaatcactattcatggtcaagaaattaattttaaaaagt

SEQ ID NO: 94 - DNA, 1955 bp, Mus musculus
dgtaaatgaagacaggctgtgcagcagggtctccggggaatgaatggattttcttcagctctgatgaaagaaacacacgctctaggaaaacaatgtccaacagggcactgcaaagatctgccgtgctgtctgcgtttgttctgctgcgagctgttaccggcttctccggagacgggaaagcaatatgggataaaaaacagtacgtgagtccggtaaacccaagtcagctgttcctctatgacactttccctaaaaacttttcctggggcgttgggaccggagcatttcaagtggaagggagttggaagacagatggaagaggaccctcgatctgggatcggtacgtctactcacacctgagaggtgtcaacggcacagacagatccactgacagttacatctttctggaaaaagacttgttggctctggattttttaggagtttctttttatcagttctcaatctcctggccacggttgtttcccaatggaacagtagcagcagtgaatgcgcaaggtctccggtactaccgtgcacttctggactcgctggtacttaggaatatcgagcccattgttaccttgtaccattgggatttgcctctgacgctccaggaagaatatgggggctggaaaaatgcaactatgatagatctcttcaacgactatgccacatactgcttccagacctttggagaccgtgtcaaatattggattacaattcacaacccttaccttgttgcttggcatgggtttggcacaggtatgcatgcaccaggagagaagggaaatttaacagctgtctacactgtgggacacaacctgatcaaggcacattcgaaagtgtggcataactacgacaaaaacttccgccctcatcagaagggttggctctccatcaccttggggtcccattggatagagccaaacagaacagacaacatggaggacgtgatcaactgccagcactccatgtcctctgtgcttggatggttcgccaaccccatccacggggacggcgactaccctgagttcatgaagacgggcgccatgatccccgagttctctgaggcagagaaggaggagcaataaaatttgatgaaatccgcgtgtttggttatacggcctggactctcctggatggctttgagtggcaggatgcctatacgacccgacgagggctgttttatgtggactttaacagtgagcagaaagagaggaaacccaagtcctcggctcattactacaagcagatcatacaagacaacggcttccctttgaaagagtccacgccagacatgaagggtcggttcccctgtgatttctcttggggagtcactgagtctgttcttaagcccgagtttacggtctcctccccgcagtttaccgatcctcacctgtatgtgtggaatgtcactggcaacagattgctctaccgagtggaaggggtaaggctgaaaacaagaccatcccagtgcacagattatgtgagcatcaaaaaacgagttgaaatgttggcaaaaatgaaagtcacccactaccagtttgctctggactggacctctatccttcccactggcaatctgtccaaagttaacagacaagtgttaaggtactataggtgtgtggtgagcgaaggactgaagctgggcgtcttccccatggtgacgttgtaccacccaacccactcccatctcggcctccccctgccacttctgagcagtggggggtggctaaacatgaacacagccaaggccttccaggactacgctgagctgtgcttccgggagttgggggacttggtgaagctctggatcaccatcaatgagcctaacaggctgagtgacatgtacaaccgcacgagtaatgacacctaccgtgcagcccacaacctgatgatcgcccatgcccaggtctggcacctctatgataggcagtataggccggtccagcatg

SEQ ID NO: 95 - protein, 1045 aa, Homo sapiens
PMKPGCAAGSPGNEWIFFSTDEITTRYRNTMSNGGLQRSVILSALILLRAVTGFSGDGRAIWSKNPNFTPVNESQLFLYDTFPKNFFWGIGTGALQVEGSWKKDGKGPSIWDHFIHTHLKNVSSTNGSSDSYIFLEKDLSALDFIGVSFYQFSISWPRLFPDGIVTVANAKGLQYYSTLLDALVLRNIEPIVTLYHWDLPLALQEKYGGWKNDTIIDIFNDYATYCFQMFGDRVKYWITIHNPYLVAWHGYGTGMHAPGEKGNLAAVYTVGHNLIKAHSKVWHNYNTHFRPHQKGWLSITLGSHWIEPNRSENTMDIFKCQQSMVSVLGWFANPIHGDGDYPEGMRKKLFSVLPIFSEAEKHEMRGTADFFAFSFGPNNFKPLNTMAKMGQNVSLNLREALNWIKLEYNNPRILIAENGWFTDSRVKTEDTTAIYMMKNFLSQVLQAIRLDEIRVFGYTAWSLLDGFEWQDAYTIRRGLFYVDFNSKQKERKPKSSAHYYKQIIRENGFSLKESTPDVQGQFPCDFSWGVTESVLKPESVASSPQFSDPHLYVWNATGNRLLHRVEGVRLKTRPAQCTDFVNIKKQLEMLARMKVTHYRFALDWASVLPTGNLSAVNRQALRYYRCVVSEGLKLGISAMVTLYYPTHAHLGLPEPLLHADGWLNPSTAEAFQAYAGLCFQELGDLVKLWITINEPNRLSDIYNRSGNDTYGAAHNLLVAHALAWRLYDRQFRPSQRGAVSLSLHADWAEPANPYADSHWRAAERFLQFEIAWFAEPLFKTGDYPAAMREYIASKHRRGLSSSALPRLTEAERRLLKGTVDFCALNHFTTRFVMHEQLAGSRYDSDRDIQFLQDITRLSSPTRLAVIPWGVRKLLRWVRRNYGDMDIYITASGIDDQALEDDRLRKYYLGKYLQEVLKAYLIDKVRIKGYYAFKLAEEKSKPRFGFFTSDFKAKSSIQFYNKVISSRGFPFENSSSRCSQTQENTECTVCLFLVQKKPLIFLGCCFFSTLVLLLSIAIFQRQKRRKFWKAKNLQHIPLKKGKRVVS

SEQ ID NO: 96 - protein, 1044 aa, Mus musculus
PMKTGCAAGSPGNEWIFFSSDERNTRSRKTMSNRALQRSAVLSAFVLLRAVTGFSGDGKAIWDKKQYVSPVNPSQLFLYDTFPKNFSWGVGTGAFQVEGSWKTDGRGPSIWDRYVYSHLRGVNGTDRSTDSYIFLEKDLLALDFLGVSFYQFSISWPRLFPNGTVAAVNAQGLRYYRALLDSLVLRNIEPIVTLYHWDLPLTLQEEYGGWKNATMIDLFNDYATYCFQTFGDRVKYWITIHNPYLVAWHGFGTGMHAPGEKGNLTAVYTVGHNLIKAHSKVWHNYDKNFRPHQKGWLSITLGSHWIEPNRTDNMEDVINCQHSMSSVLGWFANPIHGDGDYPEFMKTGAMIPEFSEAEKEEVRGTADFFAFSFGPNNFRPSNTVVKMGQNVSLNLRQVLNWIKLEYDDPQILISENGWFTDSYIKTEDTTAIYMMKNFLNQVLQAIKFDEIRVFGYTAWTLLDGFEWQDAYTTRRGLFYVDFNSEQKERKPKSSAHYYKQIIQDNGFPLKESTPDMKGRFPCDFSWGVTESVLKPEFTVSSPQFTDPHLYVWNVTGNRLLYRVEGVRLKTRPSQCTDYVSIKKRVEMLAKMKVTHYQFALDWTSILPTGNLSKVNRQVLRYYRCVVSEGLKLGVFPMVTLYHPTHSHLGLPLPLLSSGGWLNMNTAKAFQDYAELCFRELGDLVKLWITINEPNRLSDMYNRTSNDTYRAAHNLMIAHAQVWHLYDRQYRPVQHGAVSLSLHCDWAEPANPFVDSHWKAAERFLQFEIAWFADPLFKTGDYPSVMKEYIASKNQRGLSSSVLPRFTAKESRLVKGTVDFYALNHFTTRFVIHKQLNTNRSVADRDVQFLQDITRLSSPSRLAVTPWGVRKLLAWIRRNYRDRDIYITANGIDDLALEDDQIRKYYLEKYVQEALKAYLIDKVKIKGYYAFKLTEEKSKPRFGFFTSDFRAKSSVQFYSKLISSSGLPAENRSPACGQPAEDTDCTICSFLVEKKPLIFFGCCFISTLAVLLSITVFHHQKRRKFQKARNLQNIPLKKGHSRVFS

SEQ ID NO: 97 - DNA, 5918 bp, Homo sapiens
dagatgcaggggcgcaaacgccaaaggagaccaggctgtaggaagagaagggcagagcgccggacagctcggcccgctccccgtcctttggggccgcggctggggaactacaaggcccagcaggcagctgcagggggcggaggcggaggagggaccagcgcgggtgggagtgagagagcgagccctcgcgccccgccggcgcatagcgctcggagcgctcttgcggccacaggcgcggcgtcctcggcggcgggcggcagctagcgggagccgggacgccggtgcagccgcagcgcgcggaggaacccgggtgtgccgggagctgggcggccacgtccggacgggaccgagacccctcgtagcgcattgcggcgacctcgccttccccggccgcgagcgcgccgctgcttgaaaagccgcggaacccaaggacttttctccggtccgagctcggggcgccccgcagggcgcacggtacccgtgctgcagtcgggcacgccgcggcgccggggcctccgcagggcgatggagcccggtctgcaaggaaagtgaggcgccgccgctgcgttctggaggaggggggcacaaggtctggagaccccgggtggcggacgggagccctccccccgccccgcctccggggcaccagctccggctccattgttcccgcccgggctggaggcgccgagcaccgagcgccgccgggagtcgagcgccggccgcggagctcttgcgaccccgccaggacccgaacagagcccgggggcggcgggccggagccggggacgcgggcacacgcccgctcgcacaagccacggcggactctcccgaggcggaacctccacgccgagcgagggtcagtttgaaaaggaggatcgagctcactgtggagtatccatggagatgtggagccttgtcaccaacctctaactgcagaactgggatgtggagctggaagtgcctcctcttctgggctgtgctggtcacagccacactctgcaccgctaggccgtccccgaccttgcctgaacaagcccagccctggggagcccctgtggaagtggagtccttcctggtccaccccggtgacctgctgcagcttcgctgtcggctgcgggacgatgtgcagagcatcaactggctgcgggacggggtgcagctggcggaaagcaaccgcacccgcatcacaggggaggaggtggaggtgcaggactccgtgcccgcagactccggcctctatgcttgcgtaaccagcagcccctcgggcagtgacaccacctacttctccgtcaatgtttcagatgctctcccctcctcggaggatgatgatgatgatgatgactcctcttcagaggagaaagaaacagataacaccaaaccaaaccgtatgcccgtagctccatattggacatccccagaaaagatggaaaagaaattgcatgcagtgccggctgccaagacagtgaagttcaaatgcccttccagtgggaccccaaaccccacactgcgctggttgaaaaatggcaaagaattcaaacctgaccacagaattggaggctacaaggtccgttatgccacctggagcatcataatggactctgtggtgccctctgacaagggcaactacacctgcattgtggagaatgagtacggcagcatcaaccacacataccagctggatgtcgtggagcggtcccctcaccggcccatcctgcaagcagggttgcccgccaacaaaacagtggccctgggtagcaacgtggagttcatgtgtaaggtgtacagtgacccgcagccgcacatccagtggctaaagcacatcgaggtgaatgggagcaagattggcccagacaacctgccttatgtccagatcttgaagactgctggagttaataccaccgacaaagagatggaggtgcttcacttaagaaatgtctcctttgaggacgcaggggagtatacgtgcttggcgggtaactctatcggactctcccatcactctgcatggttgaccgttctggaagccctggaagagaggccggcagtgatgacctcgcccctgtacctggagatcatcatctattgcacaggggccttcctcatctcctgcatggtggggtcggtcatcgtctacaagatgaagagtggtaccaagaagagtgacttccacagccagatggctgtgcacaagctggccaagagcatccctctgcgcagacaggtaacagtgtctgctgactccagtgcatccatgaactctggggttcttctggttcggccatcacggctctcctccagtgggactcccatgctagcaggggtctctgagtatgagcttcccgaagaccctcgctgggagctgcctcgggacagactggtcttaggcaaacccctgggagagggctgctttgggcaggtggtgttggcagaggctatcgggctggacaaggacaaacccaaccgtgtgaccaaagtggctgtgaagatgttgaagtcggacgcaacagagaaagacttgtcagacctgatctcagaaatggagatgatgaagatgatcgggaagcataagaatatcatcaacctgctgggggcctgcacgcaggatggtcccttgtatgtcatcgtggagtatgcctccaagggcaacctgcgggagtacctgcaggcccggaggcccccagggctggaatactgctacaaccccagccacaacccagaggagcagctctcctccaaggacctggtgtcctgcgcctaccaggtggcccgaggcatggagtatctggcctccaagaagtgcatacaccgagacctggcagccaggaatgtcctggtgacagaggacaatgtgatgaagatagcagactttggcctcgcacgggacattcaccacatcgactactataaaaagacaaccaacggccgactgcctgtgaagtggatggcacccgaggcattatttgaccggatctacacccaccagagtgatgtgtggtctttcggggtgctcctgtgggagatcttcactctgggcggctccccataccccggtgtgcctgtggaggaacttttcaagctgctgaaggagggtcaccgcatggacaagcccagtaactgcaccaacgagctgtacatgatgatgcgggactgctggcatgcagtgccctcacagagacccaccttcaagcagctggtggaagacctggaccgcatcgtggccttgacctccaaccaggagtacctggacctgtccatgcccctggaccagtactcccccagctttcccgacacccggagctctacgtgctcctcaggggaggattccgtcttctctcatgagccgctgcccgaggagccctgcctgccccgacacccagcccagcttgccaatggcggactcaaacgccgctgactgccacccacacgccctccccagactccaccgtcagctgtaaccctcacccacagcccctgctgggcccaccacctgtccgtccctgtcccctttcctgctggcaggagccggctgcctaccaggggccttcctgtgtggcctgccttcaccccactcagctcacctctccctccacctcctctccacctgctggtgagaggtgcaaagaggcagatctttgctgccagccacttcatcccctcccagatgttggaccaacacccctccctgccaccaggcactgcctggagggcagggagtgggagccaatgaacaggcatgcaagtgagagcttcctgagctttctcctgtcggtttggtctgttttgccttcacccataagcccctcgcactctggtggcaggtgccttgtcctcagggctacagcagtagggaggtcagtgcttcgtgcctcgattgaaggtgacctctgccccagataggtggtgccagtggcttattaattccgatactagtttgctttgctgaccaaatgcctggtaccagaggatggtgaggcgaaggccaggttgggggcagtgttgtggccctggggcccagccccaaactgggggctctgtatatagctatgaagaaaacacaaagtgtataaatctgagtatatatttacatgtctttttaaaagggtcgttaccagagatttacccatcgggtaagatgctcctggtggctgggaggcatcagttgctatatattaaaaacaaaaaagaaaaaaaaggaaaatgtttttaaaaaggtcatatattttttgctacttttgctgttttatttttttaaattatgttctaaacctattttcagtttaggtccctcaataaaaattgctgctgcttcatttatctatgggctgtatgaaaagggtgggaatgtccactggaaagaagggacacccacgggccctggggctaggtctgtcccgagggcaccgcatgctcccggcgcaggttccttgtaacctcttcttcctaggtcctgcacccagacctcacgacgcacctcctgcctctccgctgcttttggaaagtcagaaaaagaagatgtctgcttcgagggcaggaaccccatccatgcagtagaggcgctgggcagagagtcaaggcccagcagccatcgaccatggatggtttcctccaaggaaaccggtggggttgggctggggagggggcacctacctaggaatagccacggggtagagctacagtgattaagaggaaagcaagggcgcggttgctcacgcctgtaatcccagcactttgggacaccgaggtgggcagatcacttcaggtcaggagtttgagaccagcctggccaacttagtgaaaccccatctctactaaaaatgcaaaaattatccaggcatggtggcacacgcctgtaatcccagctccacaggaggctgaggcagaatcccttgaagctgggaggcggaggttgcagtgagccgagattgcgccattgcactccagcctgggcaacagagaaaacaaaaaggaaaacaaatgatgaaggtctgcagaaactgaaacccagacatgtgtctgccccctctatgtgggcatggttttgccagtgcttctaagtgcaggagaacatgtcacctgaggctagttttgcattcaggtccctggcttcgtttcttgttggtatgcctccccagatcgtccttcctgtatccatgtgaccagactgtatttgttgggactgtcgcagatcttggcttcttacagttcttcctgtccaaactccatcctgtccctcaggaacggggggaaaattctccgaatgtttttggttttttggctgcttggaatttacttctgccacctgctggtcatcactgtcctcactaagtggattctggctcccccgtacctcatggctcaaactaccactcctcagtcgctatattaaagcttatattttgctggattactgctaaatacaaaagaaagttcaatatgttttcatttctgtagggaaaatgggattgctgctttaaatttctgagctagggattttttggcagctgcagtgttggcgactattgtaaaattctctttgtttctctctgtaaatagcacctgctaacattacaatttgtatttatgtttaaagaaggcatcatttggtgaacagaactaggaaatgaatttttagctcttaaaagcatttgctttgagaccgcacaggagtgtctttccttgtaaaacagtgatgataatttctgccttggccctaccttgaagcaatgttgtgtgaagggatgaagaatctaaaagtcttcataagtccttgggagaggtgctagaaaaatataaggcactatcataattacagtgatgtccttgctgttactactcaaatcacccacaaatttccccaaagactgcgctagctgtcaaataaaagacagtgaaattgacctgaaaaaaaaaaaaaaaaa

SEQ ID NO: 98 - DNA, 5912 bp, Homo sapiens
dagatgcaggggcgcaaacgccaaaggagaccaggctgtaggaagagaagggcagagcgccggacagctcggcccgctccccgtcctttggggccgcggctggggaactacaaggcccagcaggcagctgcagggggcggaggcggaggagggaccagcgcgggtgggagtgagagagcgagccctcgcgccccgccggcgcatagcgctcggagcgctcttgcggccacaggcgcggcgtcctcggcggcgggcggcagctagcgggagccgggacgccggtgcagccgcagcgcgcggaggaacccgggtgtgccgggagctgggcggccacgtccggacgggaccgagacccctcgtagcgcattgcggcgacctcgccttccccggccgcgagcgcgccgctgcttgaaaagccgcggaacccaaggacttttctccggtccgagctcggggcgccccgcagggcgcacggtacccgtgctgcagtcgggcacgccgcggcgccggggcctccgcagggcgatggagcccggtctgcaaggaaagtgaggcgccgccgctgcgttctggaggaggggggcacaaggtctggagaccccgggtggcggacgggagccctccccccgccccgcctccggggcaccagctccggctccattgttcccgcccgggctggaggcgccgagcaccgagcgccgccgggagtcgagcgccggccgcggagctcttgcgaccccgccaggacccgaacagagcccgggggcggcgggccggagccggggacgcgggcacacgcccgctcgcacaagccacggcggactctcccgaggcggaacctccacgccgagcgagggtcagtttgaaaaggaggatcgagctcactgtggagtatccatggagatgtggagccttgtcaccaacctctaactgcagaactgggatgtggagctggaagtgcctcctcttctgggctgtgctggtcacagccacactctgcaccgctaggccgtccccgaccttgcctgaacaagcccagccctggggagcccctgtggaagtggagtccttcctggtccaccccggtgacctgctgcagcttcgctgtcggctgcgggacgatgtgcagagcatcaactggctgcgggacggggtgcagctggcggaaagcaaccgcacccgcatcacaggggaggaggtggaggtgcaggactccgtgcccgcagactccggcctctatgcttgcgtaaccagcagcccctcgggcagtgacaccacctacttctccgtcaatgtttcagatgctctcccctcctcggaggatgatgatgatgatgatgactcctcttcagaggagaaagaaacagataacaccaaaccaaaccccgtagctccatattggacatccccagaaaagatggaaaagaaattgcatgcagtgccggctgccaagacagtgaagttcaaatgcccttccagtgggaccccaaaccccacactgcgctggttgaaaaatggcaaagaattcaaacctgaccacagaattggaggctacaaggtccgttatgccacctggagcatcataatggactctgtggtgccctctgacaagggcaactacacctgcattgtggagaatgagtacggcagcatcaaccacacataccagctggatgtcgtggagcggtcccctcaccggcccatcctgcaagcagggttgcccgccaacaaaacagtggccctgggtagcaacgtggagttcatgtgtaaggtgtacagtgacccgcagccgcacatccagtggctaaagcacatcgaggtgaatgggagcaagattggcccagacaacctgccttatgtccagatcttgaagactgctggagttaataccaccgacaaagagatggaggtgcttcacttaagaaatgtctcctttgaggacgcaggggagtatacgtgcttggcgggtaactctatcggactctcccatcactctgcatggttgaccgttctggaagccctggaagagaggccggcagtgatgacctcgcccctgtacctggagatcatcatctattgcacaggggccttcctcatctcctgcatggtggggtcggtcatcgtctacaagatgaagagtggtaccaagaagagtgacttccacagccagatggctgtgcacaagctggccaagagcatccctctgcgcagacaggtaacagtgtctgctgactccagtgcatccatgaactctggggttcttctggttcggccatcacggctctcctccagtgggactcccatgctagcaggggtctctgagtatgagcttcccgaagaccctcgctgggagctgcctcgggacagactggtcttaggcaaacccctgggagagggctgctttgggcaggtggtgttggcagaggctatcgggctggacaaggacaaacccaaccgtgtgaccaaagtggctgtgaagatgttgaagtcggacgcaacagagaaagacttgtcagacctgatctcagaaatggagatgatgaagatgatcgggaagcataagaatatcatcaacctgctgggggcctgcacgcaggatggtcccttgtatgtcatcgtggagtatgcctccaagggcaacctgcgggagtacctgcaggcccggaggcccccagggctggaatactgctacaaccccagccacaacccagaggagcagctctcctccaaggacctggtgtcctgcgcctaccaggtggcccgaggcatggagtatctggcctccaagaagtgcatacaccgagacctggcagccaggaatgtcctggtgacagaggacaatgtgatgaagatagcagactttggcctcgcacgggacattcaccacatcgactactataaaaagacaaccaacggccgactgcctgtgaagtggatggcacccgaggcattatttgaccggatctacacccaccagagtgatgtgtggtctttcggggtgctcctgtgggagatcttcactctgggcggctccccataccccggtgtgcctgtggaggaacttttcaagctgctgaaggagggtcaccgcatggacaagcccagtaactgcaccaacgagctgtacatgatgatgcgggactgctggcatgcagtgccctcacagagacccaccttcaagcagctggtggaagacctggaccgcatcgtggccttgacctccaaccaggagtacctggacctgtccatgcccctggaccagtactcccccagctttcccgacacccggagctctacgtgctcctcaggggaggattccgtcttctctcatgagccgctgcccgaggagccctgcctgccccgacacccagcccagcttgccaatggcggactcaaacgccgctgactgccacccacacgccctccccagactccaccgtcagctgtaaccctcacccacagcccctgctgggcccaccacctgtccgtccctgtcccctttcctgctggcaggagccggctgcctaccaggggccttcctgtgtggcctgccttcaccccactcagctcacctctccctccacctcctctccacctgctggtgagaggtgcaaagaggcagatctttgctgccagccacttcatcccctcccagatgttggaccaacacccctccctgccaccaggcactgcctggagggcagggagtgggagccaatgaacaggcatgcaagtgagagcttcctgagctttctcctgtcggtttggtctgttttgccttcacccataagcccctcgcactctggtggcaggtgccttgtcctcagggctacagcagtagggaggtcagtgcttcgtgcctcgattgaaggtgacctctgccccagataggtggtgccagtggcttattaattccgatactagtttgctttgctgaccaaatgcctggtaccagaggatggtgaggcgaaggccaggttgggggcagtgttgtggccctggggcccagccccaaactgggggctctgtatatagctatgaagaaaacacaaagtgtataaatctgagtatatatttacatgtctttttaaaagggtcgttaccagagatttacccatcgggtaagatgctcctggtggctgggaggcatcagttgctatatattaaaaacaaaaaagaaaaaaaaggaaaatgtttttaaaaaggtcatatattttttgctacttttgctgttttatttttttaaattatgttctaaacctattttcagtttaggtccctcaataaaaattgctgctgcttcatttatctatgggctgtatgaaaagggtgggaatgtccactggaaagaagggacacccacgggccctggggctaggtctgtcccgagggcaccgcatgctcccggcgcaggttccttgtaacctcttcttcctaggtcctgcacccagacctcacgacgcacctcctgcctctccgctgcttttggaaagtcagaaaaagaagatgtctgcttcgagggcaggaaccccatccatgcagtagaggcgctgggcagagagtcaaggcccagcagccatcgaccatggatggtttcctccaaggaaaccggtggggttgggctggggagggggcacctacctaggaatagccacggggtagagctacagtgattaagaggaaagcaagggcgcggttgctcacgcctgtaatcccagcactttgggacaccgaggtgggcagatcacttcaggtcaggagtttgagaccagcctggccaacttagtgaaaccccatctctactaaaaatgcaaaaattatccaggcatggtggcacacgcctgtaatcccagctccacaggaggctgaggcagaatcccttgaagctgggaggcggaggttgcagtgagccgagattgcgccattgcactccagcctgggcaacagagaaaacaaaaaggaaaacaaatgatgaaggtctgcagaaactgaaacccagacatgtgtctgccccctctatgtgggcatggttttgccagtgcttctaagtgcaggagaacatgtcacctgaggctagttttgcattcaggtccctggcttcgtttcttgttggtatgcctccccagatcgtccttcctgtatccatgtgaccagactgtatttgttgggactgtcgcagatcttggcttcttacagttcttcctgtccaaactccatcctgtccctcaggaacggggggaaaattctccgaatgtttttggttttttggctgcttggaatttacttctgccacctgctggtcatcactgtcctcactaagtggattctggctcccccgtacctcatggctcaaactaccactcctcagtcgctatattaaagcttatattttgctggattactgctaaatacaaaagaaagttcaatatgttttcatttctgtagggaaaatgggattgctgctttaaatttctgagctagggattttttggcagctgcagtgttggcgactattgtaaaattctctttgtttctctctgtaaatagcacctgctaacattacaatttgtatttatgtttaaagaaggcatcatttggtgaacagaactaggaaatgaatttttagctcttaaaagcatttgctttgagaccgcacaggagtgtctttccttgtaaaacagtgatgataatttctgccttggccctaccttgaagcaatgttgtgtgaagggatgaagaatctaaaagtcttcataagtccttgggagaggtgctagaaaaatataaggcactatcataattacagtgatgtccttgctgttactactcaaatcacccacaaatttccccaaagactgcgctagctgtcaaataaaagacagtgaaattgacctgaaaaaaaaaaaaaaaaa

SEQ ID NO: 99 - DNA, 5651 bp, Homo sapiens
dagatgcaggggcgcaaacgccaaaggagaccaggctgtaggaagagaagggcagagcgccggacagctcggcccgctccccgtcctttggggccgcggctggggaactacaaggcccagcaggcagctgcagggggcggaggcggaggagggaccagcgcgggtgggagtgagagagcgagccctcgcgccccgccggcgcatagcgctcggagcgctcttgcggccacaggcgcggcgtcctcggcggcgggcggcagctagcgggagccgggacgccggtgcagccgcagcgcgcggaggaacccgggtgtgccgggagctgggcggccacgtccggacgggaccgagacccctcgtagcgcattgcggcgacctcgccttccccggccgcgagcgcgccgctgcttgaaaagccgcggaacccaaggacttttctccggtccgagctcggggcgccccgcagggcgcacggtacccgtgctgcagtcgggcacgccgcggcgccggggcctccgcagggcgatggagcccggtctgcaaggaaagtgaggcgccgccgctgcgttctggaggaggggggcacaaggtctggagaccccgggtggcggacgggagccctccccccgccccgcctccggggcaccagctccggctccattgttcccgcccgggctggaggcgccgagcaccgagcgccgccgggagtcgagcgccggccgcggagctcttgcgaccccgccaggacccgaacagagcccgggggcggcgggccggagccggggacgcgggcacacgcccgctcgcacaagccacggcggactctcccgaggcggaacctccacgccgagcgagggtcagtttgaaaaggaggatcgagctcactgtggagtatccatggagatgtggagccttgtcaccaacctctaactgcagaactgggatgtggagctggaagtgcctcctcttctgggctgtgctggtcacagccacactctgcaccgctaggccgtccccgaccttgcctgaacaagatgctctcccctcctcggaggatgatgatgatgatgatgactcctcttcagaggagaaagaaacagataacaccaaaccaaaccgtatgcccgtagctccatattggacatccccagaaaagatggaaaagaaattgcatgcagtgccggctgccaagacagtgaagttcaaatgcccttccagtgggaccccaaaccccacactgcgctggttgaaaaatggcaaagaattcaaacctgaccacagaattggaggctacaaggtccgttatgccacctggagcatcataatggactctgtggtgccctctgacaagggcaactacacctgcattgtggagaatgagtacggcagcatcaaccacacataccagctggatgtcgtggagcggtcccctcaccggcccatcctgcaagcagggttgcccgccaacaaaacagtggccctgggtagcaacgtggagttcatgtgtaaggtgtacagtgacccgcagccgcacatccagtggctaaagcacatcgaggtgaatgggagcaagattggcccagacaacctgccttatgtccagatcttgaagactgctggagttaataccaccgacaaagagatggaggtgcttcacttaagaaatgtctcctttgaggacgcaggggagtatacgtgcttggcgggtaactctatcggactctcccatcactctgcatggttgaccgttctggaagccctggaagagaggccggcagtgatgacctcgcccctgtacctggagatcatcatctattgcacaggggccttcctcatctcctgcatggtggggtcggtcatcgtctacaagatgaagagtggtaccaagaagagtgacttccacagccagatggctgtgcacaagctggccaagagcatccctctgcgcagacaggtaacagtgtctgctgactccagtgcatccatgaactctggggttcttctggttcggccatcacggctctcctccagtgggactcccatgctagcaggggtctctgagtatgagcttcccgaagaccctcgctgggagctgcctcgggacagactggtcttaggcaaacccctgggagagggctgctttgggcaggtggtgttggcagaggctatcgggctggacaaggacaaacccaaccgtgtgaccaaagtggctgtgaagatgttgaagtcggacgcaacagagaaagacttgtcagacctgatctcagaaatggagatgatgaagatgatcgggaagcataagaatatcatcaacctgctgggggcctgcacgcaggatggtcccttgtatgtcatcgtggagtatgcctccaagggcaacctgcgggagtacctgcaggcccggaggcccccagggctggaatactgctacaaccccagccacaacccagaggagcagctctcctccaaggacctggtgtcctgcgcctaccaggtggcccgaggcatggagtatctggcctccaagaagtgcatacaccgagacctggcagccaggaatgtcctggtgacagaggacaatgtgatgaagatagcagactttggcctcgcacgggacattcaccacatcgactactataaaaagacaaccaacggccgactgcctgtgaagtggatggcacccgaggcattatttgaccggatctacacccaccagagtgatgtgtggtctttcggggtgctcctgtgggagatcttcactctgggcggctccccataccccggtgtgcctgtggaggaacttttcaagctgctgaaggagggtcaccgcatggacaagcccagtaactgcaccaacgagctgtacatgatgatgcgggactgctggcatgcagtgccctcacagagacccaccttcaagcagctggtggaagacctggaccgcatcgtggccttgacctccaaccaggagtacctggacctgtccatgcccctggaccagtactcccccagctttcccgacacccggagctctacgtgctcctcaggggaggattccgtcttctctcatgagccgctgcccgaggagccctgcctgccccgacacccagcccagcttgccaatggcggactcaaacgccgctgactgccacccacacgccctccccagactccaccgtcagctgtaaccctcacccacagcccctgctgggcccaccacctgtccgtccctgtcccctttcctgctggcaggagccggctgcctaccaggggccttcctgtgtggcctgccttcaccccactcagctcacctctccctccacctcctctccacctgctggtgagaggtgcaaagaggcagatctttgctgccagccacttcatcccctcccagatgttggaccaacacccctccctgccaccaggcactgcctggagggcagggagtgggagccaatgaacaggcatgcaagtgagagcttcctgagctttctcctgtcggtttggtctgttttgccttcacccataagcccctcgcactctggtggcaggtgccttgtcctcagggctacagcagtagggaggtcagtgcttcgtgcctcgattgaaggtgacctctgccccagataggtggtgccagtggcttattaattccgatactagtttgctttgctgaccaaatgcctggtaccagaggatggtgaggcgaaggccaggttgggggcagtgttgtggccctggggcccagccccaaactgggggctctgtatatagctatgaagaaaacacaaagtgtataaatctgagtatatatttacatgtctttttaaaagggtcgttaccagagatttacccatcgggtaagatgctcctggtggctgggaggcatcagttgctatatattaaaaacaaaaaagaaaaaaaaggaaaatgtttttaaaaaggtcatatattttttgctacttttgctgttttatttttttaaattatgttctaaacctattttcagtttaggtccctcaataaaaattgctgctgcttcatttatctatgggctgtatgaaaagggtgggaatgtccactggaaagaagggacacccacgggccctggggctaggtctgtcccgagggcaccgcatgctcccggcgcaggttccttgtaacctcttcttcctaggtcctgcacccagacctcacgacgcacctcctgcctctccgctgcttttggaaagtcagaaaaagaagatgtctgcttcgagggcaggaaccccatccatgcagtagaggcgctgggcagagagtcaaggcccagcagccatcgaccatggatggtttcctccaaggaaaccggtggggttgggctggggagggggcacctacctaggaatagccacggggtagagctacagtgattaagaggaaagcaagggcgcggttgctcacgcctgtaatcccagcactttgggacaccgaggtgggcagatcacttcaggtcaggagtttgagaccagcctggccaacttagtgaaaccccatctctactaaaaatgcaaaaattatccaggcatggtggcacacgcctgtaatcccagctccacaggaggctgaggcagaatcccttgaagctgggaggcggaggttgcagtgagccgagattgcgccattgcactccagcctgggcaacagagaaaacaaaaaggaaaacaaatgatgaaggtctgcagaaactgaaacccagacatgtgtctgccccctctatgtgggcatggttttgccagtgcttctaagtgcaggagaacatgtcacctgaggctagttttgcattcaggtccctggcttcgtttcttgttggtatgcctccccagatcgtccttcctgtatccatgtgaccagactgtatttgttgggactgtcgcagatcttggcttcttacagttcttcctgtccaaactccatcctgtccctcaggaacggggggaaaattctccgaatgtttttggttttttggctgcttggaatttacttctgccacctgctggtcatcactgtcctcactaagtggattctggctcccccgtacctcatggctcaaactaccactcctcagtcgctatattaaagcttatattttgctggattactgctaaatacaaaagaaagttcaatatgttttcatttctgtagggaaaatgggattgctgctttaaatttctgagctagggattttttggcagctgcagtgttggcgactattgtaaaattctctttgtttctctctgtaaatagcacctgctaacattacaatttgtatttatgtttaaagaaggcatcatttggtgaacagaactaggaaatgaatttttagctcttaaaagcatttgctttgagaccgcacaggagtgtctttccttgtaaaacagtgatgataatttctgccttggccctaccttgaagcaatgttgtgtgaagggatgaagaatctaaaagtcttcataagtccttgggagaggtgctagaaaaatataaggcactatcataattacagtgatgtccttgctgttactactcaaatcacccacaaatttccccaaagactgcgctagctgtcaaataaaagacagtgaaattgacctgaaaaaaaaaaaaaaaaa

SEQ ID NO: 100 - DNA, 5025 bp, Mus musculus
dgagtgagagagcgagccctcgcgcctcgccggcgcacagcgctcggagcgctcctgcgggtactttggcggggctctccgctgcgggcggcgcggaacgggagccggaaccctggtgcagccgctgcgtgcagaggacccgggctgcgcagggaagcggggccgagacgtccggactggactgagactgtgcttagcgcattgcggcgacctcgcctttcccggccgcgagcgcgcgccgcagctggaaaagcagcggagaccgaggacttttctcaggtcccaggggcgcaccacagccgtgctgcagtcaatgcacgccggagccccaggaggggtgatggaactcgggctgccagaagcctgagacgccgccaccgccgccgctgcgtactggagagcggggggcgcacgatctggggaccccgggcggcggacccgagccctcccccccgccccgcctccggggcaccagcttcggctccattgttcccgcccgggctggaggcgcccggctcggagtgccgccgggagtcgtgcctcggccgcggagccctcgagaccccatcaggatctgaacggagcccggagacgagcggcgggagcgcaagacacagacacccgccgcgccacggcgagctctccagaggcgggaccgcagcgccaagtgagagtcagcttgcgaaggcagaccacgctcacggtggaatatccatggaggtacggagccttgttaccaacctctaaccgcagaactgggatgtggggctggaagtgcctcctcttctgggctgtgctggtcacagccactctctgcactgccaggccagccccaaccttgcctgaacaagctcagccctggggagtccctgtggaagtggagtctctcctggtccaccctggcgacctgctacagcttcgctgtcggcttcgcgatgatgtgcagagcatcaactggctgcgggatggggtgcagctggtggagagcaaccgtacccgcatcacaggggaggaggtggaggtgcgggactccatccccgctgactctggcctctacgcttgcgtgaccagcagcccctctggcagcgataccacctacttctccgtcaatgtctcagatgcactcccatcctcggaagatgatgacgacgacgatgactcctcctcggaggagaaagagacggacaacaccaaaccaaaccgtaggcctgtagctccctactggacatccccagagaaaatggagaagaaactgcatgcggtgcccgctgccaagacggtgaagttcaagtgcccgtcgagtgggacacccaaccccactctgcgctggttgaaaaatggcaaagagtttaagcctgaccaccgaattggaggctacaaggttcgctatgccacctggagcatcataatggattctgtggtgccttctgacaagggcaactacacctgcatcgtggagaatgagtatgggagcatcaaccacacctaccagcttgacgtcgtggaacgatctccgcaccgacccatccttcaggcagggctgcctgccaacaagacagtggccctgggcagcaatgtggagttcatgtgtaaggtgtacagcgatccgcagcctcacattcagtggctgaagcacatcgaggtgaacgggagtaagatcgggccagacaacttgccgtatgtccagatcctgaagactgctggagttaataccaccgacaaggaaatggaggtgcttcatctacggaatgtctcctttgaggatgcgggggagtatacgtgcttggcgggtaactctatcggactctcccatcactctgcatggttgaccgttctggaagccctggaagagagaccagctgtgatgacctcaccgctctacctggagatcattatctactgcaccggggccttcctgatctcctgcatgttgggctctgtcatcatctataagatgaagagcggcaccaagaagagcgacttccatagccagatggctgtgcacaagctggccaagagcatccctctgcgcagacaggtaacagtgtcagctgactccagtgcatccatgaactctggggttctcctggttcggccctcacggctctcctccagcgggacccccatgctggctggagtctccgaatatgagctccctgaggatccccgctgggagctgccacgagacagactggtcttaggcaaaccacttggcgagggctgcttcgggcaggtggtgttggctgaggccatcgggctggataaggacaaacccaaccgtgtgaccaaagtggccgtgaagatgttgaagtccgacgcaacggagaaggacctgtcggatctgatctcggagatggagatgatgaaaatgattgggaagcacaagaatatcatcaaccttctgggagcgtgcacacaggatggtcctctttatgtcattgtggagtacgcctccaaaggcaatctccgggagtatctacaggcccggaggcctcctgggctggagtactgctataaccccagccacaaccccgaggaacagctgtcttccaaagatctggtatcctgtgcctatcaggtggctcggggcatggagtatcttgcctctaagaagtgtatacaccgagacctggctgctaggaacgtcctggtgaccgaggataacgtaatgaagatcgcagactttggcttagctcgagacattcatcatatcgactactacaagaaaaccaccaacggccggctgcctgtgaagtggatggcccctgaggcgttgtttgaccggatctacacacaccagagcgatgtgtggtcttttggagtgctcttgtgggagatcttcactctgggtggctccccataccccggtgtgcctgtggaggaacttttcaagctgctgaaggagggtcatcgaatggacaagcccagtaactgtaccaatgagctgtacatgatgatgcgggactgctggcatgcagtgccctctcagagacctacgttcaagcagttggtggaagacctggaccgcattgtggccttgacctccaaccaggagtatctggacctgtccataccgctggaccagtactcacccagctttcccgacacacggagctccacctgctcctcaggggaggactctgtcttctctcatgagccgttacctgaggagccctgtctgcctcgacaccccacccagcttgccaacagtggactcaaacggcgctgactaccaaccctgtccccagttttctcccattccgtcgtcacccgtgcccctcacccacaatccccttgttggacacactgcctttctcctcctcctttgccgctggcaagagccagtgcctgactgaggccttcctgtgttgtggccttccccctccatcacccccaagacccctcttctccctcttcttagcctgctgtgtgagagaggagccaagaggcaggtgcttgccgacggccgcatcctccttcccaggtgttggaccaagacccgccccgctgcctggcactgcttggaggtgtgcagagcggaagcaagtggagcatccggggcattcctgttgacccatcagccccttctgttctggcggcaggggccttggggctcctggaagccgtgaggtttctgtttaggccttaaccgaaggcaacctctgctccagatggatggtaccagtagcttcttaattccaatactaatttgctttgctgaccaaatacctgcctggtaccagaagacagggaggcagagactgggagccgtgatgtgcccttgggctgagccctagacttggggctctgtacatagctatgaagaaaaacacaaagtgtataaatcttgagtatatatttacatgtctttttaaaaagggtcgttactagagatttacccatgggggagacgcccagggtagcatccgttgctatatattaaaaacaaacgaacagaaagaaaaaaaaaaggaaaatgttttttaaaaggtcatatatttttttgctacttttgctgttttatttttttaaattatgttttaaacctattttcagtttaggtttccctcaataaaaaattgctgctgcttcatttttatcctgggcgtgtgaaaagagagcaggtgtccagcgcagaggagggagacagggggtaaagggccatgagctggtcttccccctgccccccatgacctctgtctcctggattgtgccccagacctcccagccaagccttctatctcccgatgcattgggaacagcaggagaagactgaggtcctgagggcagagagccaagctcgcacacttgattgtttcctcggaggagagagtgagaggatgaggttagccagagggtagaactggacagaaacccaaaccctagaccctgtacattcagatgtcttgtctatcttccccaacctactcctcatattcctctcctgtaaatatcctccccttccctgttggtctctgttacccagttgggtctgtccctgagcttggcttcctatagtttttccttcacaaactccacccatccctcaggaaacagaaaacgatctctttggttggggtcaacttggcaactcaattctgccacctgctggttgctttggtaccttggtctcttattcaaacccacaccactcaagccttagagggtttgtttttgttttttgtttgtttgtttggttggttggttggtcttttttttctgggtctgctgaatacaaacctgttcagtatgatttcatctgtaggggttagggctgcttctttaaatgcagttttggcagctgtggtttgggtcattgtcataagagttcttatcgttgtttctctctgtacacatgtaactgtcaaaatattatgaatggtttttatgctgaaagaagacatcatttggcaaagagggctagggaatgaatttagcacaaactcattttcttggagaccgtgtatcatagtggttttttttttttttctttctcttgttaaaactgaacattatttctgcctc

SEQ ID NO: 101 - DNA, 5036 bp, Mus musculus
dgagtgagagagcgagccctcgcgcctcgccggcgcacagcgctcggagcgctcctgcgggtactttggcggggctctccgctgcgggcggcgcggaacgggagccggaaccctggtgcagccgctgcgtgcagaggacccgggctgcgcagggaagcggggccgagacgtccggactggactgagactgtgcttagcgcattgcggcgacctcgcctttcccggccgcgagcgcgcgccgcagctggaaaagcagcggagaccgaggacttttctcaggtcccaggggcgcaccacagccgtgctgcagtcaatgcacgccggagccccaggaggggtgatggaactcgggctgccagaagcctgagacgccgccaccgccgccgctgcgtactggagagcggggggcgcacgatctggggaccccgggcggcggacccgagccctcccccccgccccgcctccggggcaccagcttcggctccattgttcccgcccgggctggaggcgcccggctcggagtgccgccgggagtcgtgcctcggccgcggagccctcgagaccccatcaggatctgaacggagcccggagacgagcggcgggagcgcaagacacagacacccgccgcgccacggcgagctctccagaggcgggaccgcagcgccaagtgagagtcagcttgcgaaggcagaccacgctcacggtggaatatccatggaggtacggagccttgttaccaacctctaaccgcagaactgggatgtggggctggaagtgcctcctcttctgggctgtgctggtcacagccactctctgcactgccaggccagccccaaccttgcctgaacaagctcagccctggggagtccctgtggaagtggagtctctcctggtccaccctggcgacctgctacagcttcgctgtcggcttcgcgatgatgtgcagagcatcaactggctgcgggatggggtgcagctggtggagagcaaccgtacccgcatcacaggggaggaggtggaggtgcgggactccatccccgctgactctggcctctacgcttgcgtgaccagcagcccctctggcagcgataccacctacttctccgtcaatgtctcagatgcactcccatcctcggaagatgatgacgacgacgatgactcctcctcggaggagaaagagacggacaacaccaaaccaaaccctgtagctccctactggacatccccagagaaaatggagaagaaactgcatgcggtgcccgctgccaagacggtgaagttcaagtgcccgtcgagtgggacacccaaccccactctgcgctggttgaaaaatggcaaagagtttaagcctgaccaccgaattggaggctacaaggttcgctatgccacctggagcatcataatggattctgtggtgccttctgacaagggcaactacacctgcatcgtggagaatgagtatgggagcatcaaccacacctaccagcttgacgtcgtggaacgatctccgcaccgacccatccttcaggcagggctgcctgccaacaagacagtggccctgggcagcaatgtggagttcatgtgtaaggtgtacagcgatccgcagcctcacattcagtggctgaagcacatcgaggtgaacgggagtaagatcgggccagacaacttgccgtatgtccagatcctgaagactgctggagttaataccaccgacaaggaaatggaggtgcttcatctacggaatgtctcctttgaggatgcgggggagtatacgtgcttggcgggtaactctatcggactctcccatcactctgcatggttgaccgttctggaagccctggaagagagaccagctgtgatgacctcaccgctctacctggagatcattatctactgcaccggggccttcctgatctcctgcatgttgggctctgtcatcatctataagatgaagagcggcaccaagaagagcgacttccatagccagatggctgtgcacaagctggccaagagcatccctctgcgcagacaggtaacagtgtcagctgactccagtgcatccatgaactctggggttctcctggttcggccctcacggctctcctccagcgggacccccatgctggctggagtctccgaatatgagctccctgaggatccccgctgggagctgccacgagacagactggtcttaggcaaaccacttggcgagggctgcttcgggcaggtggtgttggctgaggccatcgggctggataaggacaaacccaaccgtgtgaccaaagtggccgtgaagatgttgaagtccgacgcaacggagaaggacctgtcggatctgatctcggagatggagatgatgaaaatgattgggaagcacaagaatatcatcaaccttctgggagcgtgcacacaggatggtcctctttatgtcattgtggagtacgcctccaaaggcaatctccgggagtatctacaggcccggaggcctcctgggctggagtactgctataaccccagccacaaccccgaggaacagctgtcttccaaagatctggtatcctgtgcctatcaggtggctcggggcatggagtatcttgcctctaagaagtgtatacaccgagacctggctgctaggaacgtcctggtgaccgaggataacgtaatgaagatcgcagactttggcttagctcgagacattcatcatatcgactactacaagaaaaccaccaacggccggctgcctgtgaagtggatggcccctgaggcgttgtttgaccggatctacacacaccagagcgatgtgtggtcttttggagtgctcttgtgggagatcttcactctgggtggctccccataccccggtgtgcctgtggaggaacttttcaagctgctgaaggagggtcatcgaatggacaagcccagtaactgtaccaatgagctgtacatgatgatgcgggactgctggcatgcagtgccctctcagagacctacgttcaagcagttggtggaagacctggaccgcattgtggccttgacctccaaccaggagtatctggacctgtccataccgctggaccagtactcacccagctttcccgacacacggagctccacctgctcctcaggggaggactctgtcttctctcatgagccgttacctgaggagccctgtctgcctcgacaccccacccagcttgccaacagtggactcaaacggcgctgactaccaaccctgtccccagttttctcccattccgtcgtcacccgtgcccctcacccacaatccccttgttggacacactgcctttctcctcctcctttgccgctggcaagagccagtgcctgactgaggccttcctgtgttgtggccttccccctccatcacccccaagacccctcttctccctcttcttagcctgctgtgtgagagaggagccaagaggcaggtgcttgccgacggccgcatcctccttcccaggtgttggaccaagacccgccccgctgcctggcactgcttggaggtgtgcagagcggaagcaagtggagcatccggggcattcctgttgacccatcagccccttctgttctggcggcaggggccttggggctcctggaagccgtgaggtttctgtttaggccttaaccgaaggcaacctctgctccagatggatggtaccagtagcttcttaattccaatactaatttgctttgctgaccaaatacctgcctggtaccagaagacagggaggcagagactgggagccgtgatgtgcccttgggctgagccctagacttggggctctgtacatagctatgaagaaaaacacaaagtgtataaatcttgagtatatatttacatgtctttttaaaaagggtcgttactagagatttacccatgggggagacgcccagggtagcatccgttgctatatattaaaaacaaacgaacagaaagaaaaaaaaaaggaaaatgttttttaaaaggtcatatatttttttgctacttttgctgttttatttttttaaattatgttttaaacctattttcagtttaggtttccctcaataaaaaattgctgctgcttcatttttatcctgggcgtgtgaaaagagagcaggtgtccagcgcagaggagggagacagggggtaaagggccatgagctggtcttccccctgccccccatgacctctgtctcctggattgtgccccagacctcccagccaagccttctatctcccgatgcattgggaacagcaggagaagactgaggtcctgagggcagagagccaagctcgcacacttgattgtttcctcggaggagagagtgagaggatgaggttagccagagggtagaactggacagaaacccaaaccctagaccctgtacattcagatgtcttgtctatcttccccaacctactcctcatattcctctcctgtaaatatcctccccttccctgttggtctctgttacccagttgggtctgtccctgagcttggcttcctatagtttttccttcacaaactccacccatccctcaggaaacagaaaacgatctctttggttggggtcaacttggcaactcaattctgccacctgctggttgctttggtaccttggtctcttattcaaacccacaccactcaagccttagagggtttgtttttgttttttgtttgtttgtttggttggttggttggtcttttttttctgggtctgctgaatacaaacctgttcagtatgatttcatctgtaggggttagggctgcttctttaaatgcagttttggcagctgtggtttgggtcattgtcataagagttcttatcgttgtttctctctgtacacatgtaactgtcaaaatattatgaatggtttttatgctgaaagaagacatcatttggcaaagagggctagggaatgaatttagcacaaactcattttcttggagaccgtgtatcatagtggttttttttttttttctttctcttgttaaaactgaacattatttctgcctcaaaaaaaaaaaaaaaaa

SEQ ID NO: 102 - DNA, 4759 bp, Mus musculus
dgagtgagagagcgagccctcgcgcctcgccggcgcacagcgctcggagcgctcctgcgggtactttggcggggctctccgctgcgggcggcgcggaacgggagccggaaccctggtgcagccgctgcgtgcagaggacccgggctgcgcagggaagcggggccgagacgtccggactggactgagactgtgcttagcgcattgcggcgacctcgcctttcccggccgcgagcgcgcgccgcagctggaaaagcagcggagaccgaggacttttctcaggtcccaggggcgcaccacagccgtgctgcagtcaatgcacgccggagccccaggaggggtgatggaactcgggctgccagaagcctgagacgccgccaccgccgccgctgcgtactggagagcggggggcgcacgatctggggaccccgggcggcggacccgagccctcccccccgccccgcctccggggcaccagcttcggctccattgttcccgcccgggctggaggcgcccggctcggagtgccgccgggagtcgtgcctcggccgcggagccctcgagaccccatcaggatctgaacggagcccggagacgagcggcgggagcgcaagacacagacacccgccgcgccacggcgagctctccagaggcgggaccgcagcgccaagtgagagtcagcttgcgaaggcagaccacgctcacggtggaatatccatggaggtacggagccttgttaccaacctctaaccgcagaactgggatgtggggctggaagtgcctcctcttctgggctgtgctggtcacagccactctctgcactgccaggccagccccaaccttgcctgaacaagatgcactcccatcctcggaagatgatgacgacgacgatgactcctcctcggaggagaaagagacggacaacaccaaaccaaaccgtaggcctgtagctccctactggacatccccagagaaaatggagaagaaactgcatgcggtgcccgctgccaagacggtgaagttcaagtgcccgtcgagtgggacacccaaccccactctgcgctggttgaaaaatggcaaagagtttaagcctgaccaccgaattggaggctacaaggttcgctatgccacctggagcatcataatggattctgtggtgccttctgacaagggcaactacacctgcatcgtggagaatgagtatgggagcatcaaccacacctaccagcttgacgtcgtggaacgatctccgcaccgacccatccttcaggcagggctgcctgccaacaagacagtggccctgggcagcaatgtggagttcatgtgtaaggtgtacagcgatccgcagcctcacattcagtggctgaagcacatcgaggtgaacgggagtaagatcgggccagacaacttgccgtatgtccagatcctgaagactgctggagttaataccaccgacaaggaaatggaggtgcttcatctacggaatgtctcctttgaggatgcgggggagtatacgtgcttggcgggtaactctatcggactctcccatcactctgcatggttgaccgttctggaagccctggaagagagaccagctgtgatgacctcaccgctctacctggagatcattatctactgcaccggggccttcctgatctcctgcatgttgggctctgtcatcatctataagatgaagagcggcaccaagaagagcgacttccatagccagatggctgtgcacaagctggccaagagcatccctctgcgcagacaggtaacagtgtcagctgactccagtgcatccatgaactctggggttctcctggttcggccctcacggctctcctccagcgggacccccatgctggctggagtctccgaatatgagctccctgaggatccccgctgggagctgccacgagacagactggtcttaggcaaaccacttggcgagggctgcttcgggcaggtggtgttggctgaggccatcgggctggataaggacaaacccaaccgtgtgaccaaagtggccgtgaagatgttgaagtccgacgcaacggagaaggacctgtcggatctgatctcggagatggagatgatgaaaatgattgggaagcacaagaatatcatcaaccttctgggagcgtgcacacaggatggtcctctttatgtcattgtggagtacgcctccaaaggcaatctccgggagtatctacaggcccggaggcctcctgggctggagtactgctataaccccagccacaaccccgaggaacagctgtcttccaaagatctggtatcctgtgcctatcaggtggctcggggcatggagtatcttgcctctaagaagtgtatacaccgagacctggctgctaggaacgtcctggtgaccgaggataacgtaatgaagatcgcagactttggcttagctcgagacattcatcatatcgactactacaagaaaaccaccaacggccggctgcctgtgaagtggatggcccctgaggcgttgtttgaccggatctacacacaccagagcgatgtgtggtcttttggagtgctcttgtgggagatcttcactctgggtggctccccataccccggtgtgcctgtggaggaacttttcaagctgctgaaggagggtcatcgaatggacaagcccagtaactgtaccaatgagctgtacatgatgatgcgggactgctggcatgcagtgccctctcagagacctacgttcaagcagttggtggaagacctggaccgcattgtggccttgacctccaaccaggagtatctggacctgtccataccgctggaccagtactcacccagctttcccgacacacggagctccacctgctcctcaggggaggactctgtcttctctcatgagccgttacctgaggagccctgtctgcctcgacaccccacccagcttgccaacagtggactcaaacggcgctgactaccaaccctgtccccagttttctcccattccgtcgtcacccgtgcccctcacccacaatccccttgttggacacactgcctttctcctcctcctttgccgctggcaagagccagtgcctgactgaggccttcctgtgttgtggccttccccctccatcacccccaagacccctcttctccctcttcttagcctgctgtgtgagagaggagccaagaggcaggtgcttgccgacggccgcatcctccttcccaggtgttggaccaagacccgccccgctgcctggcactgcttggaggtgtgcagagcggaagcaagtggagcatccggggcattcctgttgacccatcagccccttctgttctggcggcaggggccttggggctcctggaagccgtgaggtttctgtttaggccttaaccgaaggcaacctctgctccagatggatggtaccagtagcttcttaattccaatactaatttgctttgctgaccaaatacctgcctggtaccagaagacagggaggcagagactgggagccgtgatgtgcccttgggctgagccctagacttggggctctgtacatagctatgaagaaaaacacaaagtgtataaatcttgagtatatatttacatgtctttttaaaaagggtcgttactagagatttacccatgggggagacgcccagggtagcatccgttgctatatattaaaaacaaacgaacagaaagaaaaaaaaaaggaaaatgttttttaaaaggtcatatatttttttgctacttttgctgttttatttttttaaattatgttttaaacctattttcagtttaggtttccctcaataaaaaattgctgctgcttcatttttatcctgggcgtgtgaaaagagagcaggtgtccagcgcagaggagggagacagggggtaaagggccatgagctggtcttccccctgccccccatgacctctgtctcctggattgtgccccagacctcccagccaagccttctatctcccgatgcattgggaacagcaggagaagactgaggtcctgagggcagagagccaagctcgcacacttgattgtttcctcggaggagagagtgagaggatgaggttagccagagggtagaactggacagaaacccaaaccctagaccctgtacattcagatgtcttgtctatcttccccaacctactcctcatattcctctcctgtaaatatcctccccttccctgttggtctctgttacccagttgggtctgtccctgagcttggcttcctatagtttttccttcacaaactccacccatccctcaggaaacagaaaacgatctctttggttggggtcaacttggcaactcaattctgccacctgctggttgctttggtaccttggtctcttattcaaacccacaccactcaagccttagagggtttgtttttgttttttgtttgtttgtttggttggttggttggtcttttttttctgggtctgctgaatacaaacctgttcagtatgatttcatctgtaggggttagggctgcttctttaaatgcagttttggcagctgtggtttgggtcattgtcataagagttcttatcgttgtttctctctgtacacatgtaactgtcaaaatattatgaatggtttttatgctgaaagaagacatcatttggcaaagagggctagggaatgaatttagcacaaactcattttcttggagaccgtgtatcatagtggttttttttttttttctttctcttgttaaaactgaacattatttctgcctca

SEQ ID NO: 103 - DNA, 2470 bp, Rattus novergicus
datgtggggctggaggggcctcctcttctgggctgtgctggtcacagccactctctgcactgccagaccagccccaaccttgcccgaacaagctcagccctggggagtccctgtggaagtggagtctctcctggtccaccctggtgacctgctacagcttcgctgccggctgcgcgatgatgtgcagagcatcaactggctgcgggatggggtgcagctggcggaaagcaaccgtacacgcatcacaggggaggaggtggaggtgcgggattccatccccgctgactctggcctctacgcttgtgtgaccaacagcccctctggcagcgataccacctacttctccgtcaatgtctcagatgcactgccatcctcggaggacgatgacgatgatgatgactcctcctcagaggagaaagagacagacaacaccaaaccaaaccgtaggcctgtggcgccatactggacatccccagagaaaatggagaagaaactgcacgcagtgccagctgccaagacggtgaaattcaaatgcccgtcgagtgggacacccagccccactttgcgctggttgaaaaacggcaaggaattcaaacctgaccaccggatcggaggctacaaggttcgttacgccacttggagcatcataatggactctgtggtgccttctgacaagggcaactacacctgcatcgtggagaacgagtatgggagcattaaccacacctaccagctagacgttgtggagcgatcccctcaccggcccatccttcaggcagggctaccagccaacaagaccgtggccctgggcagcaacgtggagttcatgtgcaaggtgtacagtgacccccagcctcacatccagtggctgaagcacatcgaggtgaatgggagtaagatcggtccagacaacttgccgtatgaccagatcctgaagactgctggagttaataccaccgacaaggaaatggaggtgcttcatctacggaatgtctcctttgaggatgcgggggagtatacgtgcttggcgggtaactctatcggactctcccatcactctgcatggttgaccgttctggaagccctggaagagagaccagccgtgatgacctcacctctgtacctggaaatcattatctactgcaccggggccttcctgatctcctgtatggtgggctccgtcatcatctacaagatgaagagcggcaccaagaagagcgacttccatagccagatggctgtgcataagctggctaagagcatccctctccgcagacaggtaacagtgtcagctgactccagcgcatccatgaactccggggttctcctggttcggccttcgcgactgtcctccagcggaacccccatgctagctggcgtctctgaatatgagctccctgaagatccccgctgggagctgccccgggacagactggtcttaggaaaaccgcttggcgagggctgcttcgggcaggtggtgttggccgaagccatcggtctggataaggacaaacccaaccgcgtgaccaaagtggccgtgaagatgttgaagtctgatgcgacggagaaggacctgtcggacctgatctcggagatggagatgatgaaaatgatcgggaagcacaagaatatcatcaacctgctgggggcgtgcacacaggatggtcctctctatgtcattgtggagtatgcctccaaaggcaatcttcgggagtatctgcaggcccggaggcctcctgggctggagtattgctacaaccccagccacaaccctgaggaacagctgtcttccaaagatctggtgtcctgtgcctatcaggtggcccggggcatggagtatcttgcctcgaagaagtgtatacaccgagacctggctgctaggaatgtcctggtgacagaggataatgtcatgaagatcgcagactttggcctagctcgagacattcaccatatcgactactataagaaaaccaccaatggccggctgcctgtgaagtggatggcacctgaggcattgtttgaccggatctacacccaccagagtgatgtgtggtcttttggggtgctcttatgggagatattcactctgggtggctcaccaaaccccggcgtgcctgtggaagaacttttcaagctgttgaaggagggtcatcgaatggacaagcccagtaactgtaccaatgagctgtacatgatgatgcgggactgctggaacgcagtgccctctcagagaccaactttcaagcagttggtggaagacctggaccggattgtggccttgacctccaaccaggagtatctggacctgtccatgccactggaccaggactcgccaagctttccggacacacggagctctacctgctcttcaggggaggactctgtcttctctcatgagccatttcctgaggagccctgtctgccccgacaccccacccagcttgcaaatggcggactcaaccggcgctga

SEQ ID NO: 104 - protein, 823 aa, Homo sapiens
PMWSWKCLLFWAVLVTATLCTARPSPTLPEQAQPWGAPVEVESFLVHPGDLLQLRCRLRDDVQSINWLRDGVQLAESNRTRITGEEVEVQDSVPADSGLYACVTSSPSGSDTTYFSVNVSDALPSSEDDDDDDDSSSEEKETDNTKPNRMPVAPYWTSPEKMEKKLHAVPAAKTVKFKCPSSGTPNPTLRWLKNGKEFKPDHRIGGYKVRYATWSIIMDSVVPSDKGNYTCIVENEYGSINHTYQLDVVERSPHRPILQAGLPANKTVALGSNVEFMCKVYSDPQPHIQWLKHIEVNGSKIGPDNLPYVQILKTAGVNTTDKEMEVLHLRNVSFEDAGEYTCLAGNSIGLSHHSAWLTVLEALEERPAVMTSPLYLEIIIYCTGAFLISCMVGSVIVYKMKSGTKKSDFHSQMAVHKLAKSIPLRRQVTVSADSSASMNSGVLLVRPSRLSSSGTPMLAGVSEYELPEDPRWELPRDRLVLGKPLGEGCFGQVVLAEAIGLDKDKPNRVTKVAVKMLKSDATEKDLSDLISEMEMMKMIGKHKNIINLLGACTQDGPLYVIVEYASKGNLREYLQARRPPGLEYCYNPSHNPEEQLSSKDLVSCAYQVARGMEYLASKKCIHRDLAARNVLVTEDNVMKIADFGLARDIHHIDYYKKTTNGRLPVKWMAPEALFDRIYTHQSDVWSFGVLLWEIFTLGGSPYPGVPVEELFKLLKEGHRMDKPSNCTNELYMMMRDCWHAVPSQRPTFKQLVEDLDRIVALTSNQEYLDLSMPLDQYSPSFPDTRSSTCSSGEDSVFSHEPLPEEPCLPRHPAQLANGGLKRR

SEQ ID NO: 105 - protein, 821 aa, Homo sapiens
PMWSWKCLLFWAVLVTATLCTARPSPTLPEQAQPWGAPVEVESFLVHPGDLLQLRCRLRDDVQSINWLRDGVQLAESNRTRITGEEVEVQDSVPADSGLYACVTSSPSGSDTTYFSVNVSDALPSSEDDDDDDDSSSEEKETDNTKPNPVAPYWTSPEKMEKKLHAVPAAKTVKFKCPSSGTPNPTLRWLKNGKEFKPDHRIGGYKVRYATWSIIMDSVVPSDKGNYTCIVENEYGSINHTYQLDVVERSPHRPILQAGLPANKTVALGSNVEFMCKVYSDPQPHIQWLKHIEVNGSKIGPDNLPYVQILKTAGVNTTDKEMEVLHLRNVSFEDAGEYTCLAGNSIGLSHHSAWLTVLEALEERPAVMTSPLYLEIIIYCTGAFLISCMVGSVIVYKMKSGTKKSDFHSQMAVHKLAKSIPLRRQVTVSADSSASMNSGVLLVRPSRLSSSGTPMLAGVSEYELPEDPRWELPRDRLVLGKPLGEGCFGQVVLAEAIGLDKDKPNRVTKVAVKMLKSDATEKDLSDLISEMEMMKMIGKHKNIINLLGACTQDGPLYVIVEYASKGNLREYLQARRPPGLEYCYNPSHNPEEQLSSKDLVSCAYQVARGMEYLASKKCIHRDLAARNVLVTEDNVMKIADFGLARDIHHIDYYKKTTNGRLPVKWMAPEALFDRIYTHQSDVWSFGVLLWEIFTLGGSPYPGVPVEELFKLLKEGHRMDKPSNCTNELYMMMRDCWHAVPSQRPTFKQLVEDLDRIVALTSNQEYLDLSMPLDQYSPSFPDTRSSTCSSGEDSVFSHEPLPEEPCLPRHPAQLANGGLKRR

SEQ ID NO: 106 - protein, 734 aa, Homo sapiens
PMWSWKCLLFWAVLVTATLCTARPSPTLPEQDALPSSEDDDDDDDSSSEEKETDNTKPNRMPVAPYWTSPEKMEKKLHAVPAAKTVKFKCPSSGTPNPTLRWLKNGKEFKPDHRIGGYKVRYATWSIIMDSVVPSDKGNYTCIVENEYGSINHTYQLDVVERSPHRPILQAGLPANKTVALGSNVEFMCKVYSDPQPHIQWLKHIEVNGSKIGPDNLPYVQILKTAGVNTTDKEMEVLHLRNVSFEDAGEYTCLAGNSIGLSHHSAWLTVLEALEERPAVMTSPLYLEIIIYCTGAFLISCMVGSVIVYKMKSGTKKSDFHSQMAVHKLAKSIPLRRQVTVSADSSASMNSGVLLVRPSRLSSSGTPMLAGVSEYELPEDPRWELPRDRLVLGKPLGEGCFGQVVLAEAIGLDKDKPNRVTKVAVKMLKSDATEKDLSDLISEMEMMKMIGKHKNIINLLGACTQDGPLYVIVEYASKGNLREYLQARRPPGLEYCYNPSHNPEEQLSSKDLVSCAYQVARGMEYLASKKCIHRDLAARNVLVTEDNVMKIADFGLARDIHHIDYYKKTTNGRLPVKWMAPEALFDRIYTHQSDVWSFGVLLWEIFTLGGSPYPGVPVEELFKLLKEGHRMDKPSNCTNELYMMMRDCWHAVPSQRPTFKQLVEDLDRIVALTSNQEYLDLSMPLDQYSPSFPDTRSSTCSSGEDSVFSHEPLPEEPCLPRHPAQLANGGLKRR

SEQ ID NO: 107 - protein, 823 aa, Mus musculus
PMWGWKCLLFWAVLVTATLCTARPAPTLPEQAQPWGVPVEVESLLVHPGDLLQLRCRLRDDVQSINWLRDGVQLVESNRTRITGEEVEVRDSIPADSGLYACVTSSPSGSDTTYFSVNVSDALPSSEDDDDDDDSSSEEKETDNTKPNRRPVAPYWTSPEKMEKKLHAVPAAKTVKFKCPSSGTPNPTLRWLKNGKEFKPDHRIGGYKVRYATWSIIMDSVVPSDKGNYTCIVENEYGSINHTYQLDVVERSPHRPILQAGLPANKTVALGSNVEFMCKVYSDPQPHIQWLKHIEVNGSKIGPDNLPYVQILKTAGVNTTDKEMEVLHLRNVSFEDAGEYTCLAGNSIGLSHHSAWLTVLEALEERPAVMTSPLYLEIIIYCTGAFLISCMLGSVIIYKMKSGTKKSDFHSQMAVHKLAKSIPLRRQVTVSADSSASMNSGVLLVRPSRLSSSGTPMLAGVSEYELPEDPRWELPRDRLVLGKPLGEGCFGQVVLAEAIGLDKDKPNRVTKVAVKMLKSDATEKDLSDLISEMEMMKMIGKHKNIINLLGACTQDGPLYVIVEYASKGNLREYLQARRPPGLEYCYNPSHNPEEQLSSKDLVSCAYQVARGMEYLASKKCIHRDLAARNVLVTEDNVMKIADFGLARDIHHIDYYKKTTNGRLPVKWMAPEALFDRIYTHQSDVWSFGVLLWEIFTLGGSPYPGVPVEELFKLLKEGHRMDKPSNCTNELYMMMRDCWHAVPSQRPTFKQLVEDLDRIVALTSNQEYLDLSIPLDQYSPSFPDTRSSTCSSGEDSVFSHEPLPEEPCLPRHPTQLANSGLKRR

SEQ ID NO: 108 - protein, 821 aa, Mus musculus
PMWGWKCLLFWAVLVTATLCTARPAPTLPEQAQPWGVPVEVESLLVHPGDLLQLRCRLRDDVQSINWLRDGVQLVESNRTRITGEEVEVRDSIPADSGLYACVTSSPSGSDTTYFSVNVSDALPSSEDDDDDDDSSSEEKETDNTKPNPVAPYWTSPEKMEKKLHAVPAAKTVKFKCPSSGTPNPTLRWLKNGKEFKPDHRIGGYKVRYATWSIIMDSVVPSDKGNYTCIVENEYGSINHTYQLDVVERSPHRPILQAGLPANKTVALGSNVEFMCKVYSDPQPHIQWLKHIEVNGSKIGPDNLPYVQILKTAGVNTTDKEMEVLHLRNVSFEDAGEYTCLAGNSIGLSHHSAWLTVLEALEERPAVMTSPLYLEIIIYCTGAFLISCMLGSVIIYKMKSGTKKSDFHSQMAVHKLAKSIPLRRQVTVSADSSASMNSGVLLVRPSRLSSSGTPMLAGVSEYELPEDPRWELPRDRLVLGKPLGEGCFGQVVLAEAIGLDKDKPNRVTKVAVKMLKSDATEKDLSDLISEMEMMKMIGKHKNIINLLGACTQDGPLYVIVEYASKGNLREYLQARRPPGLEYCYNPSHNPEEQLSSKDLVSCAYQVARGMEYLASKKCIHRDLAARNVLVTEDNVMKIADFGLARDIHHIDYYKKTTNGRLPVKWMAPEALFDRIYTHQSDVWSFGVLLWEIFTLGGSPYPGVPVEELFKLLKEGHRMDKPSNCTNELYMMMRDCWHAVPSQRPTFKQLVEDLDRIVALTSNQEYLDLSIPLDQYSPSFPDTRSSTCSSGEDSVFSHEPLPEEPCLPRHPTQLANSGLKRR

SEQ ID NO: 109 - protein, 734 aa, Mus musculus
PMWGWKCLLFWAVLVTATLCTARPAPTLPEQDALPSSEDDDDDDDSSSEEKETDNTKPNRRPVAPYWTSPEKMEKKLHAVPAAKTVKFKCPSSGTPNPTLRWLKNGKEFKPDHRIGGYKVRYATWSIIMDSVVPSDKGNYTCIVENEYGSINHTYQLDVVERSPHRPILQAGLPANKTVALGSNVEFMCKVYSDPQPHIQWLKHIEVNGSKIGPDNLPYVQILKTAGVNTTDKEMEVLHLRNVSFEDAGEYTCLAGNSIGLSHHSAWLTVLEALEERPAVMTSPLYLEIIIYCTGAFLISCMLGSVIIYKMKSGTKKSDFHSQMAVHKLAKSIPLRRQVTVSADSSASMNSGVLLVRPSRLSSSGTPMLAGVSEYELPEDPRWELPRDRLVLGKPLGEGCFGQVVLAEAIGLDKDKPNRVTKVAVKMLKSDATEKDLSDLISEMEMMKMIGKHKNIINLLGACTQDGPLYVIVEYASKGNLREYLQARRPPGLEYCYNPSHNPEEQLSSKDLVSCAYQVARGMEYLASKKCIHRDLAARNVLVTEDNVMKIADFGLARDIHHIDYYKKTTNGRLPVKWMAPEALFDRIYTHQSDVWSFGVLLWEIFTLGGSPYPGVPVEELFKLLKEGHRMDKPSNCTNELYMMMRDCWHAVPSQRPTFKQLVEDLDRIVALTSNQEYLDLSIPLDQYSPSFPDTRSSTCSSGEDSVFSHEPLPEEPCLPRHPTQLANSGLKRR

SEQ ID NO: 110 - protein, 823 aa, Rattus novergicus
PMWGWRGLLFWAVLVTATLCTARPAPTLPEQAQPWGVPVEVESLLVHPGDLLQLRCRLRDDVQSINWLRDGVQLAESNRTRITGEEVEVRDSIPADSGLYACVTNSPSGSDTTYFSVNVSDALPSSEDDDDDDDSSSEEKETDNTKPNRRPVAPYWTSPEKMEKKLHAVPAAKTVKFKCPSSGTPSPTLRWLKNGKEFKPDHRIGGYKVRYATWSIIMDSVVPSDKGNYTCIVENEYGSINHTYQLDVVERSPHRPILQAGLPANKTVALGSNVEFMCKVYSDPQPHIQWLKHIEVNGSKIGPDNLPYDQILKTAGVNTTDKEMEVLHLRNVSFEDAGEYTCLAGNSIGLSHHSAWLTVLEALEERPAVMTSPLYLEIIIYCTGAFLISCMVGSVIIYKMKSGTKKSDFHSQMAVHKLAKSIPLRRQVTVSADSSASMNSGVLLVRPSRLSSSGTPMLAGVSEYELPEDPRWELPRDRLVLGKPLGEGCFGQVVLAEAIGLDKDKPNRVTKVAVKMLKSDATEKDLSDLISEMEMMKMIGKHKNIINLLGACTQDGPLYVIVEYASKGNLREYLQARRPPGLEYCYNPSHNPEEQLSSKDLVSCAYQVARGMEYLASKKCIHRDLAARNVLVTEDNVMKIADFGLARDIHHIDYYKKTTNGRLPVKWMAPEALFDRIYTHQSDVWSFGVLLWEIFTLGGSPNPGVPVEELFKLLKEGHRMDKPSNCTNELYMMMRDCWNAVPSQRPTFKQLVEDLDRIVALTSNQEYLDLSMPLDQDSPSFPDTRSSTCSSGEDSVFSHEPFPEEPCLPRHPTQLANGGLNRR

SEQ ID NO: 111 - DNA, 2052 bp, Homo sapiens
dagtttgcaccgaccccgatctggcagcgccgcgaagacgagcggtcaccggcgcccgacccgagcgcgcccagaggacggcggggagccaagccgacccccgagcagcgccgcgcggaccctgaggctcagaggggcagcttcaggggaggacaccccactggccaggacgccccaggctctgctgctctgccactcagctgccctcggaggagcgtacacacccaccaggactgcattgccccagctgtgcagcccctgccagatgtgggaggcagctagctgcccagaggcatgcccccctgccagccacagcgacccctgctgctgttgctgctgctgctggcctgccagccacaggtcccctccgctcaggtgatggacttcctgtttgagaagtggaagctctacggtgaccagtgtcaccacaacctgagcctgctgccccctcccacggagctggtgtgcaacagaaccttcgacaagtattcctgctggccggacacccccgccaataccacggccaacatctcctgcccctggtacctgccttggcaccacaaagtgcaacaccgcttcgtgttcaagagatgcgggcccgacggtcagtgggtgcgtggaccccgggggcagccttggcgtgatgcctcccagtgccagatggatggcgaggagattgaggtccagaaggaggtggccaagatgtacagcagcttccaggtgatgtacacagtgggctacagcctgtccctgggggccctgctcctcgccttggccatcctggggggcctcagcaagctgcactgcacccgcaatgccatccacgcgaatctgtttgcgtccttcgtgctgaaagccagctccgtgctggtcattgatgggctgctcaggacccgctacagccagaaaattggcgacgacctcagtgtcagcacctggctcagtgatggagcggtggctggctgccgtgtggccgcggtgttcatgcaatatggcatcgtggccaactactgctggctgctggtggagggcctgtacctgcacaacctgctgggcctggccaccctccccgagaggagcttcttcagcctctacctgggcatcggctggggtgcccccatgctgttcgtcgtcccctgggcagtggtcaagtgtctgttcgagaacgtccagtgctggaccagcaatgacaacatgggcttctggtggatcctgcggttccccgtcttcctggccatcctgatcaacttcttcatcttcgtccgcatcgttcagctgctcgtggccaagctgcgggcacggcagatgcaccacacagactacaagttccggctggccaagtccacgctgaccctcatccctctgctgggcgtccacgaagtggtcttcgccttcgtgacggacgagcacgcccagggcaccctgcgctccgccaagctcttcttcgacctcttcctcagctccttccagggcctgctggtggctgtcctctactgcttcctcaacaaggaggtgcagtcggagctgcggcggcgttggcaccgctggcgcctgggcaaagtgctatgggaggagcggaacaccagcaaccacagggcctcatcttcgcccggccacggccctcccagcaaggagctgcagtttgggaggggtggtggcagccaggattcatctgcggagacccccttggctggtggcctccctagattggctgagagccccttctgaaccctgctgggaccccagctagggctggactctggcacccagagggcgtcgctggacaacccagaactggacgcccagctgaggctgggggcgggggagccaacagcagcccccacctaccccccacccccagtgtggctgtctgcgagattgggcctcctctccctgcacctgccttgtccctggtgcagaggtgagcagaggagtccagggcgggagtgggggctgtgccgtgaactgcgtgccagtgtccccacgtatgtcggcacgtcccatgtgcatggaaatgtcctccaacaataaagagctcaagtggtcaccgtg

SEQ ID NO: 112 - DNA, 1930 bp, Mus musculus
dgccgaccccgatcacagcgcggccgaggcgagcagtcgccggcgcccagatccgagtacgctcgaggaccgcgaggagcgcagccctagccccggcgactgagcacacctgaggagaggtgcacacactctgaggacctaggtgtgcaacctctgccagatgtggggcgtggctacccagaggcatgcccctcacccagctccactgtccccacctgctgctgctgctgttggtgctgtcatgtctgccagaggcaccctctgcccaggtaatggactttttgtttgagaagtggaagctctatagtgaccaatgccaccacaacctaagcctgctgcccccacctactgagctggtctgtaacagaaccttcgacaagtactcctgctggcctgacacccctcccaacaccactgccaacatttcctgcccctggtacctaccttggtaccacaaagtgcagcaccgcctagtgttcaagaggtgtgggcccgatgggcagtgggttcgagggccacgggggcagccgtggcgcaacgcctcccaatgtcagttggatgatgaagagatcgaggtccagaagggggtggccaagatgtatagcagccagcaggtgatgtacaccgtgggctacagtctgtccctgggggccttgctccttgcgctggtcatcctgctgggcctcaggaagctgcactgcacccgaaactacatccatgggaacctgtttgcgtcctttgtgctcaaggctggctctgtgttggtcatcgattggctgctgaagacacggtacagccagaagattggcgatgacctcagtgtgagcgtctggctcagtgacggggcgatggccggctgcagagtggccacagtgatcatgcagtacggcatcatagccaactattgctggttgctggtagagggcgtgtacctgtacagcctgctgagccttgccaccttctctgagaggagcttcttttccctctacctgggcattggctggggtgcgcccctgctgtttgtcatcccctgggtggtggtcaagtgtctgtttgagaatgttcagtgctggaccagcaatgacaacatgggattctggtggatcctgcgtattcctgtcttcctggccttactgatcaattttttcatctttgtccacatcattcaccttcttgtggccaagctgcgtgcccatcagatgcactatgctgactataagttccggctggccaggtccacgctgaccctcatccctctgctgggggtccacgaggtggtctttgcctttgtgactgacgagcatgcccaaggcaccctgcgctccaccaagctcttttttgacctgttcctcagctccttccagggtctgctggtggctgttctctactgtttcctcaacaaggaggtgcaggcagagctgatgcggcgttggaggcaatggcaagaaggcaaagctcttcaggaggaaaggttggccagcagccatggcagccacatggccccagcagggccttgtcatggtgatccctgtgagaaacttcagcttatgagtgcaggcagcagcagtgggactggctgtgtgccctctatggagacctcgctggccagtagtctcccaaggttggctgacagccccacctgaatctccactggagcctagccaggctgcgttcagaaagggcctcagaggacaacccagagccagatgcccggccaaggctgaagagacaaagcagcaagacagcagcttgtactgtgcacactcccctaacctgtcctagcctggcacaggccacagtgacagagtaggggttggatatgatggagaagccatgttatctatgaactctgagtgttcccatgtgtgttgacatggtccctgtacccagatatgtccttcagtaaaaagctcgagtgggagctgctgca

SEQ ID NO: 113 - DNA, 1902 bp, Rattus novergicus
dccgccggcgcccagatcccagtgcgctcgaggaccgcgaggagcccagtcctagacccagcaacctgaggagaggtgcacacacccccaaggacccaggcacccaacctctgccagatgtgggggggtggctacccagaggcatgctcctcacccagctccactgtccctacctgctgctgctgctggtggtgctgtcatgtctgccaaaggcaccctctgcccaggtaatggactttttgtttgagaagtggaagctctatagtgaccagtgccaccacaacctaagcctgctgcccccacctactgagctggtctgcaacagaactttcgacaagtactcctgctggcctgacacccctcccaacaccactgccaacatttcctgcccctggtacctaccttggtaccacaaagtgcagcaccgcctagtgttcaagaggtgtgggcctgatgggcagtgggttcgagggccacgggggcagtcatggcgcgacgcctcccaatgtcagatggatgatgacgagatcgaggtccagaagggggtagccaagatgtatagcagctaccaggtgatgtacactgtgggctacagtctgtccctgggggccttgctcctggcgctggtcatcctgctgggcctcaggaagctgcactgcacccggaactacatccacgggaacctgttcgcgtccttcgtgctcaaggctggctctgtgctggtcattgattggctgctcaagacacgctatagccagaagattggagatgacctcagtgtgagcgtctggctcagtgatggggcggtggctggctgcagagtggccacagtgatcatgcagtacggcatcatagccaactactgctggttgctggtggagggtgtgtacctgtacagcctgctgagcatcaccaccttctcggagaagagcttcttctccctctatctgtgcatcggctggggatctcccctgctgtttgtcatcccctgggtggtggtcaagtgtctgtttgagaatgtccagtgctggaccagcaatgacaatatgggattctggtggatcctgcgtatccctgtactcctggccatactgatcaattttttcatctttgtccgcatcattcatcttcttgtggccaagctgcgtgcccatcagatgcactatgctgattacaagttccggctagccaggtccacgctgaccctcattcctctgctgggagtccacgaagtggtctttgcctttgtgactgatgagcatgcccagggcaccctgcgctccaccaagctcttttttgacctgttcttcagctccttccagggtctgctggtggctgttctctactgtttcctcaacaaggaggtgcaggcagagctactgcggcgttggaggcgatggcaagaaggcaaagctcttcaggaggaaaggatggccagcagccatggcagccacatggccccagcagggacttgtcatggtgatccctgtgagaaacttcagcttatgagtgcaggcagcagcagtgggactggctgtgagccctctgcgaagacctcattggccagtagtctcccaaggctggctgacagccccacctgaatctccactggactccagccaagttggattcagaaagggcctcacaagacaacccagaaacagatgcctggccaaggctgaagaggcaaagcagcaagacagcagcttgtactatccacactcccctaacctgtcctggccgggtacaggccacattgatggagtaggggctggatatgatggagtagccatgctatgaactatgggtgttcccatgagtgttgccatgttccatgcacacagatatgaccttcagtaaagagctcccgtaggaaaaaaaaaaaaaaaaaaaaaaaaaaaa

SEQ ID NO: 114 - DNA, 1894 bp, Rattus novergicus
dtgctgttcttctgtcttggagacatagaagggggactctgagctcaccggagtcgcctgaggagaggtgcacacacccccaaggacccaggcacccaacctctgccagatgtgggggggtggctacccagaggcatgctcctcacccagctccactgtccctacctgctgctgctgctggtggtgctgtcatgtctgccaaaggcaccctctgcccaggtaatggactttttgtttgagaagtggaagctctatagtgaccagtgccaccacaacctaagcctgctgcccccacctactgagctggtctgcaacagaactttcgacaagtactcctgctggcctgacacccctcccaacaccactgccaacatttcctgcccctggtacctaccttggtaccacaaagtgcagcaccgcctagtgttcaagaggtgtgggcctgatgggcagtgggttcgagggccacgggggcagtcatggcgcgacgcctcccaatgtcagatggatgatgacgagatcgaggtccagaagggggtagccaagatgtatagcagctaccaggtgatgtacactgtgggctacagtctgtccctgggggccttgctcctggcgctggtcatcctgctgggcctcaggaagctgcactgcacccggaactacatccacgggaacctgttcgcgtccttcgtgctcaaggctggctctgtgctggtcattgattggctgctcaagacacgctatagccagaagattggagatgacctcagtgtgagcgtctggctcagtgatggggcggtggctggctgcagagtggccacagtgatcatgcagtacggcatcatagccaactactgctggttgctggtggagggtgtgtacctgtacagcctgctgagcatcaccaccttctcggagaagagcttcttctccctctatctgtgcatcggctggggatctcccctgctgtttgtcatcccctgggtggtggtcaagtgtctgtttgagaatgtccagtgctggaccagcaatgacaatatgggattctggtggatcctgcgtatccctgtactcctggccatactgatcaattttttcatctttgtccgcatcattcatcttcttgtggccaagctgcgtgcccatcagatgcactatgctgattacaagttccggctagccaggtccacgctgaccctcattcctctgctgggagtccacgaagtggtctttgcctttgtgactgatgagcatgcccagggcaccctgcgctccaccaagctcttttttgacctgttcttcagctccttccagggtctgctggtggctgttctctactgtttcctcaacaaggaggtgcaggcagagctactgcggcgttggaggcgatggcaagaaggcaaagctcttcaggaggaaaggatggccagcagccatggcagccacatggccccagcagggacttgtcatggtgatccctgtgagaaacttcagcttatgagtgcaggcagcagcagtgggactggctgtgagccctctgcgaagacctcattggccagtagtctcccaaggctggctgacagccccacctgaatctccactggactccagccaagttggattcagaaagggcctcacaagacaacccagaaacagatgcctggccaaggctgaagaggcaaagcagcaagacagcagcttgtactatccacactcccctaacctgtcctggccgggtacaggccacattgatggagtaggggctggatatgatggagtagccatgctatgaactatgggtgttcccatgagtgttgccatgttccatgcacacagatatgaccttcagtaaagagctcccgtaggaaaaaaaaaaaaaaaaaaaaaaaaaaaa

SEQ ID NO: 115 - protein, 478 aa, Homo sapiens
PMPPCQPQRPLLLLLLLLACQPQVPSAQVMDFLFEKWKLYGDQCHHNLSLLPPPTELVCNRTFDKYSCWPDTPANTTANISCPWYLPWHHKVQHRFVFKRCGPDGQWVRGPRGQPWRDASQCQMDGEEIEVQKEVAKMYSSFQVMYTVGYSLSLGALLLALAILGGLSKLHCTRNAIHANLFASFVLKASSVLVIDGLLRTRYSQKIGDDLSVSTWLSDGAVAGCRVAAVFMQYGIVANYCWLLVEGLYLHNLLGLATLPERSFFSLYLGIGWGAPMLFVVPWAVVKCLFENVQCWTSNDNMGFWWILRFPVFLAILINFFIFVRIVQLLVAKLRARQMHHTDYKFRLAKSTLTLIPLLGVHEVVFAFVTDEHAQGTLRSAKLFFDLFLSSFQGLLVAVLYCFLNKEVQSELRRRWHRWRLGKVLWEERNTSNHRASSSPGHGPPSKELQFGRGGGSQDSSAETPLAGGLPRLAESPF

SEQ ID NO: 116 - protein, 391 aa, Mus musculus
PRDRGPGQLWRVWGGVTAGLCGARGYGTAQPHSASGLQKGVAKMYSSQQVMYTVGYSLSLGALLLALVILLGLRKLHCTRNYIHGNLFASFVLKAGSVLVIDWLLKTRYSQKIGDDLSVSVWLSDGAMAGCRVATVIMQYGIIANYCWLLVEGVYLYSLLSLATFSERSFFSLYLGIGWGAPLLFVIPWVVVKCLFENVQCWTSNDNMGFWWILRIPVFLALLINFFIFVHIIHLLVAKLRAHQMHYADYKFRLARSTLTLIPLLGVHEVVFAFVTDEHAQGTLRSTKLFFDLFLSSFQGLLVAVLYCFLNKEVQAELMRRWRQWQEGKALQEERLASSHGSHMAPAGPCHGDPCEKLQLMSAGSSSGTGCVPSMETSLASSLPRLADSPT

SEQ ID NO: 117 - protein, 486 aa, Mus musculus
PMPLTQLHCPHLLLLLLVLSCLPEAPSAQVMDFLFEKWKLYSDQCHHNLSLLPPPTELVCNRTFDKYSCWPDTPPNTTANISCPWYLPWYHKVQHRLVFKRCGPDGQWVRGPRGQPWRNASQCQLDDEEIEVQKGVAKMYSSQQVMYTVGYSLSLGALLLALVILLGLRKLHCTRNYIHGNLFASFVLKAGSVLVIDWLLKTRYSQKIGDDLSVSVWLSDGAMAGCRVATVIMQYGIIANYCWLLVEGVYLYSLLSLATFSERSFFSLYLGIGWGAPLLFVIPWVVVKCLFENVQCWTSNDNMGFWWILRIPVFLALLINFFIFVHIIHLLVAKLRAHQMHYADYKFRLARSTLTLIPLLGVHEVVFAFVTDEHAQGTLRSTKLFFDLFLSSFQGLLVAVLYCFLNKEVQAELMRRWRQWQEGKALQEERLASSHGSHMAPAGPCHGDPCEKLQLMSAGSSSGTGCVPSMETSLASSLPRLADSPT

SEQ ID NO: 118 - protein, 109 aa, Mus musculus
PMPLTQLHCPHLLLLLLVLSCLPEAPSAQVMDFLFEKWKLYSDQCHHNLSLLPPPTELVCNRTFDKYSCWPDTPPNTTANISCPWYLPWYHKGNSGRPGRLRGWSLGVG

SEQ ID NO: 119 - protein, 325 aa, Rattus novergicus
PMTRSRSRKLHCTRNYIHGNLFASFVLKAGSVLVIDWLLKTRYSQKIGDDLSVSVWLSDGAVAGCRVATVIMQYGIIANYCWLLVEGVYLYSLLSITTFSEKSFFSLYLCIGWGSPLLFVIPWVVVKCLFENVQCWTSNDNMGFWWILRIPVLLAILINFFIFVRIIHLLVAKLRAHQMHYADYKFRLARSTLTLIPLLGVHEVVFAFVTDEHAQGTLRSTKLFFDLFFSSFQGLLVAVLYCFLNKEVQAELLRRWRRWQEGKALQEERMASSHGSHMAPAGTCHGDPCEKLQLMSAGSSSGTGCEPSAKTSLASSLPRLADSPT

SEQ ID NO: 120 - protein, 486 aa, Rattus novergicus
PMLLTQLHCPYLLLLLVVLSCLPKAPSAQVMDFLFEKWKLYSDQCHHNLSLLPPPTELVCNRTFDKYSCWPDTPPNTTANISCPWYLPWYHKVQHRLVFKRCGPDGQWVRGPRGQSWRDASQCQMDDDEIEVQKGVAKMYSSYQVMYTVGYSLSLGALLLALVILLGLRKLHCTRNYIHGNLFASFVLKAGSVLVIDWLLKTRYSQKIGDDLSVSVWLSDGAVAGCRVATVIMQYGIIANYCWLLVEGVYLYSLLSITTFSEKSFFSLYLCIGWGSPLLFVIPWVVVKCLFENVQCWTSNDNMGFWWILRIPVLLAILINFFIFVRIIHLLVAKLRAHQMHYADYKFRLARSTLTLIPLLGVHEVVFAFVTDEHAQGTLRSTKLFFDLFFSSFQGLLVAVLYCFLNKEVQAELLRRWRRWQEGKALQEERMASSHGSHMAPAGTCHGDPCEKLQLMSAGSSSGTGCEPSAKTSLASSLPRLADSPT

SEQ ID NO: 121 - protein, 218 aa, Rattus novergicus
PMPHLAQAVAGCRVATVIMQYGIIANYCWLLVEGVYLYSLLSITTFSEKSFFSLYLCIGWGSPLLFVIPWVVVKCLFENVQCWTSNDNMGFWWILRIPVLLAILINFFIFVRIIHLLVAKLRAHQMHYADYKFRLARSTLTLIPLLGVHEVVFAFVTDEHAQGTLRSTKLFFDLFFSSFQVSLHHSPSLGHKSAVPDHSLSPGSAGGCSLLFPQQGGR

SEQ ID NO: 122 - DNA, 2071 bp, Homo sapiens
dctgaagagccggtgcagagcgggcggcggcggcggcggcagcggaggcggcggctccagccggcgcggcgcgaggctcggcggtgggatccggcgggcggtgctagctccgcgctccctgcctcgctcgctgccgggggcggtcggaaggcgcggcgcgaagcccgggtggcccgagggcgcgactctagccttgtcacctcatcttgcccccttggttttggaagtcctgaagagttggtctggaggaggaggaggacattgatgtgcttggtgtgtggccagtggtgaagagatggctgctcctgtcccgtgggcctgctgtgctgtgcttgccgccgccgccgcagttgtctacgcccagagacacagtccacaggaggcaccccatgtgcagtacgagcgcctgggctctgacgtgacactgccatgtgggacagcaaactgggatgctgcggtgacgtggcgggtaaatgggacagacctggcccctgacctgctcaacggctctcagctggtgctccatggcctggaactgggccacagtggcctctacgcctgcttccaccgtgactcctggcacctgcgccaccaagtcctgctgcatgtgggcttgccgccgcgggagcctgtgctcagctgccgctccaacacttaccccaagggcttctactgcagctggcatctgcccacccccacctacattcccaacaccttcaatgtgactgtgctgcatggctccaaaattatggtctgtgagaaggacccagccctcaagaaccgctgccacattcgctacatgcacctgttctccaccatcaagtacaaggtctccataagtgtcagcaatgccctgggccacaatgccacagctatcacctttgacgagttcaccattgtgaagcctgatcctccagaaaatgtggtagcccggccagtgcccagcaaccctcgccggctggaggtgacgtggcagaccccctcgacctggcctgaccctgagtcttttcctctcaagttctttctgcgctaccgacccctcatcctggaccagtggcagcatgtggagctgtccgacggcacagcacacaccatcacagatgcctacgccgggaaggagtacattatccaggtggcagccaaggacaatgagattgggacatggagtgactggagcgtagccgcccacgctacgccctggactgaggaaccgcgacacctcaccacggaggcccaggctgcggagaccacgaccagcaccaccagctccctggcacccccacctaccacgaagatctgtgaccctggggagctgggcagcggcgggggaccctcggcacccttcttggtcagcgtccccatcactctggccctggctgccgctgccgccactgccagcagtctcttgatctgagcccggcaccccatgaggacatgcagagcacctgcagaggagcaggaggccggagctgagcctgcagaccccggtttctattttgcacacgggcaggaggaccttttgcattctcttcagacacaatttgtggagaccccggcgggcccgggcctgccgccccccagccctgccgcaccaagctggccctccttcctccctcaggggaggtgggccatgcagctaacccacccaccaaagaccccctcaccctggccccttgggctggaccctccaatgccagcgactcccaggagcccttgggggacgtgaggggagcctctcacatccgatttctcctcctgccccagcctcctgtctatcccagggtctctgttgccaccatcagattataagctcctgatgctgggggggcccagccatccccctccccccagcacccacaattttcagtcccctcccctctgccctgttttgtatacccctcccctgaccctgctcctatcccacagtatttaatgccctgtcagtcccttctagtctgactcaatggtaacttgctgtatttgaattttttatagatgtatatacagggtggggggagtgggcggttctcattaaacgtcaccatttcatgagaaaaaaaaaaaaaaaaaa

SEQ ID NO: 123 - DNA, 1960 bp, Homo sapiens
dctgaagagccggtgcagagcgggcggcggcggcggcggcagcggaggcggcggctccagccggcgcggcgcgaggctcggcggtgggatccggcgggcggtgctagctccgcgctccctgcctcgctcgctgccgggggcggtcggaaggcgcggcgcgaagcccgggtggcccgagggcgcgatggctgctcctgtcccgtgggcctgctgtgctgtgcttgccgccgccgccgcagttgtctacgcccagagacacagtccacaggaggcaccccatgtgcagtacgagcgcctgggctctgacgtgacactgccatgtgggacagcaaactgggatgctgcggtgacgtggcgggtaaatgggacagacctggcccctgacctgctcaacggctctcagctggtgctccatggcctggaactgggccacagtggcctctacgcctgcttccaccgtgactcctggcacctgcgccaccaagtcctgctgcatgtgggcttgccgccgcgggagcctgtgctcagctgccgctccaacacttaccccaagggcttctactgcagctggcatctgcccacccccacctacattcccaacaccttcaatgtgactgtgctgcatggctccaaaattatggtctgtgagaaggacccagccctcaagaaccgctgccacattcgctacatgcacctgttctccaccatcaagtacaaggtctccataagtgtcagcaatgccctgggccacaatgccacagctatcacctttgacgagttcaccattgtgaagcctgatcctccagaaaatgtggtagcccggccagtgcccagcaaccctcgccggctggaggtgacgtggcagaccccctcgacctggcctgaccctgagtcttttcctctcaagttctttctgcgctaccgacccctcatcctggaccagtggcagcatgtggagctgtccgacggcacagcacacaccatcacagatgcctacgccgggaaggagtacattatccaggtggcagccaaggacaatgagattgggacatggagtgactggagcgtagccgcccacgctacgccctggactgaggaaccgcgacacctcaccacggaggcccaggctgcggagaccacgaccagcaccaccagctccctggcacccccacctaccacgaagatctgtgaccctggggagctgggcagcggcgggggaccctcggcacccttcttggtcagcgtccccatcactctggccctggctgccgctgccgccactgccagcagtctcttgatctgagcccggcaccccatgaggacatgcagagcacctgcagaggagcaggaggccggagctgagcctgcagaccccggtttctattttgcacacgggcaggaggaccttttgcattctcttcagacacaatttgtggagaccccggcgggcccgggcctgccgccccccagccctgccgcaccaagctggccctccttcctccctcaggggaggtgggccatgcagctaacccacccaccaaagaccccctcaccctggccccttgggctggaccctccaatgccagcgactcccaggagcccttgggggacgtgaggggagcctctcacatccgatttctcctcctgccccagcctcctgtctatcccagggtctctgttgccaccatcagattataagctcctgatgctgggggggcccagccatccccctccccccagcacccacaattttcagtcccctcccctctgccctgttttgtatacccctcccctgaccctgctcctatcccacagtatttaatgccctgtcagtcccttctagtctgactcaatggtaacttgctgtatttgaattttttatagatgtatatacagggtggggggagtgggcggttctcattaaacgtcaccatttcatgagaaaaaaaaaaaaaaaaaa

SEQ ID NO: 124 - DNA, 1947 bp, Homo sapiens
dccggggctgcgcgtgaagcacggggaccacagccgtcttgagggcgcgcccgagaaaggactctagccttgtcacctcatcttgcccccttggttttggaagtcctgaagagttggtctggaggaggaggaggacattgatgtgcttggtgtgtggccagtggtgaagagatggctgctcctgtcccgtgggcctgctgtgctgtgcttgccgccgccgccgcagttgtctacgcccagagacacagtccacaggaggcaccccatgtgcagtacgagcgcctgggctctgacgtgacactgccatgtgggacagcaaactgggatgctgcggtgacgtggcgggtaaatgggacagacctggcccctgacctgctcaacggctctcagctggtgctccatggcctggaactgggccacagtggcctctacgcctgcttccaccgtgactcctggcacctgcgccaccaagtcctgctgcatgtgggcttgccgccgcgggagcctgtgctcagctgccgctccaacacttaccccaagggcttctactgcagctggcatctgcccacccccacctacattcccaacaccttcaatgtgactgtgctgcatggctccaaaattatggtctgtgagaaggacccagccctcaagaaccgctgccacattcgctacatgcacctgttctccaccatcaagtacaaggtctccataagtgtcagcaatgccctgggccacaatgccacagctatcacctttgacgagttcaccattgtgaagcctgatcctccagaaaatgtggtagcccggccagtgcccagcaaccctcgccggctggaggtgacgtggcagaccccctcgacctggcctgaccctgagtcttttcctctcaagttctttctgcgctaccgacccctcatcctggaccagtggcagcatgtggagctgtccgacggcacagcacacaccatcacagatgcctacgccgggaaggagtacattatccaggtggcagccaaggacaatgagattgggacatggagtgactggagcgtagccgcccacgctacgccctggactgaggaaccgcgacacctcaccacggaggcccaggctgcggagaccacgaccagcaccaccagctccctggcacccccacctaccacgaagatctgtgaccctggggagctgggcagcggcgggggaccctcggcacccttcttggtcagcgtccccatcactctggccctggctgccgctgccgccactgccagcagtctcttgatctgagcccggcaccccatgaggacatgcagagcacctgcagaggagcaggaggccggagctgagcctgcagaccccggtttctattttgcacacgggcaggaggaccttttgcattctcttcagacacaatttgtggagaccccggcgggcccgggcctgccgccccccagccctgccgcaccaagctggccctccttcctccctcaggggaggtgggccatgcagctaacccacccaccaaagaccccctcaccctggccccttgggctggaccctccaatgccagcgactcccaggagcccttgggggacgtgaggggagcctctcacatccgatttctcctcctgccccagcctcctgtctatcccagggtctctgttgccaccatcagattataagctcctgatgctgggggggcccagccatccccctccccccagcacccacaattttcagtcccctcccctctgccctgttttgtatacccctcccctgaccctgctcctatcccacagtatttaatgccctgtcagtcccttctagtctgactcaatggtaacttgctgtatttgaattttttatagatgtatatacagggtggggggagtgggcggttctcattaaacgtcaccatttcatgagaaaaaaaaaaaaaaaaaa

SEQ ID NO: 125 - DNA, 2001 bp, Mus musculus
dgcgcgcgtgcccgcgcctgcgtgtgttcccatcaccaacgctccgtatttcgtcgcccttcctgcattccttcccgcagccgactagttagggtctgtatcctggggagctgagaaccctgccccgtcacatcatcccaggaagactttggtctggagaggaggataatattgatgtgtgtggagaacagctggtggtaacgagatggctgcttctgtcccatgggcctgctgtgctgtgcttgccgctgccgccgccgctgtctacacgcagaaacacagtccacaggaggcaccccacgtgcagtatgagcgtctgggcgcagatgtgacgctgccgtgtgggacagcgagctgggacgcagctgtgacatggagggtaaacgggacagatctggcccctgacctgctcaacggctctcagctgatactgcgaagcttagaactgggccacagtggcctatacgcctgtttccaccgtgactcctggcacctgcgccaccaagtccttctacatgtgggtttgccgccgcgggagcctgtgctcagctgccgctccaacacttaccccaagggcttctactgcagctggcacctgcccacccccacctacatccccaataccttcaatgtgactgtgctgcatggctccaaaattatggtctgtgagaaggacccagccctcaagaaccgctgccacattcggtacatgcacctgttctcaaccatcaagtacaaggtctccataagtgtcagcaacgccttgggtcacaacactacggccatcacctttgacgaattcaccattgtgaagcctgatcctccagaaaacgtggtggcccggccagtgcccagcaacccccgtcggctggaggtgacatggcagacaccctcaacttggcccgaccctgaatcctttcctctcaagttcttcctgcgctaccggcctctcatcctggaccaatggcagcatgtggagctctcggatggcacagcacacaccatcacagatgcctacgcagggaaggaatacatcatccaggtggcagccaaggacaatgagattgggacatggagtgactggagcgtggctgctcacgccacaccctggactgaggaacctcggcatctcacaacagaagcccaggcccccgagaccacgaccagcaccaccagctcattggcacccccacccaccacgaagatctgtgaccctggggagcttggcagcggcggaggaccctccatactcttcttgaccagtgtcccagtcactctggtcctggctgccgctgctgccacagccaacaatctcctgatctgagccctgcatcccacgaggacatgccagagcgcctgcggaggagcaggaggccggagctgagcctgcagaccccggtttctattttgcacacgggcaggaggaccttttgcattctcttcagacacaatttgtagagaccccggcaggcccgggcctgccttccgtccccccagcctcatctcaccaagccggccctcctttccatccagagaggaggaccatgcagctaacccacccaccaaagacccctctcatctttcccccctcgggctggaccctccaacgccagcgactcccaggagcccttgggggacctgaggggagcccccaccccacatccacagttttctcctcctgccccagcctcctgtctgtcccagggtctttgttgccaccatcagattataagctcctgacactgggggggcccagccatccccctccccccggtgcccacacttttcagtccttccacctttgcccctgttttgtacgatcctccattggccctttcctaccccccagtatttaatgtcctgtcagtcccttctagtctgactcaatggtaacttgctgtatttgaattttttatagatgtatatacatgggagggaggggtagggagttctcattaaacgtcaccatttcatgagaaaaaaaaaaaaaaaaaaaaaaaa

SEQ ID NO: 126 - DNA, 2022 bp, Mus musculus
dgcggcggctccagccggcgcggcgcggggttcggcagtgggatccggccgcagtgctcgctccgcgctcctgcctcgctccccgcctgcagcggccgaagggcgcggcgcggagcccgggtggcccgagggcgcgaaccctgccccgtcacatcatcccaggaagactttggtctggagaggaggataatattgatgtgtgtggagaacagctggtggtaacgagatggctgcttctgtcccatgggcctgctgtgctgtgcttgccgctgccgccgccgctgtctacacgcagaaacacagtccacaggaggcaccccacgtgcagtatgagcgtctgggcgcagatgtgacgctgccgtgtgggacagcgagctgggacgcagctgtgacatggagggtaaacgggacagatctggcccctgacctgctcaacggctctcagctgatactgcgaagcttagaactgggccacagtggcctatacgcctgtttccaccgtgactcctggcacctgcgccaccaagtccttctacatgtgggtttgccgccgcgggagcctgtgctcagctgccgctccaacacttaccccaagggcttctactgcagctggcacctgcccacccccacctacatccccaataccttcaatgtgactgtgctgcatggctccaaaattatggtctgtgagaaggacccagccctcaagaaccgctgccacattcggtacatgcacctgttctcaaccatcaagtacaaggtctccataagtgtcagcaacgccttgggtcacaacactacggccatcacctttgacgaattcaccattgtgaagcctgatcctccagaaaacgtggtggcccggccagtgcccagcaacccccgtcggctggaggtgacatggcagacaccctcaacttggcccgaccctgaatcctttcctctcaagttcttcctgcgctaccggcctctcatcctggaccaatggcagcatgtggagctctcggatggcacagcacacaccatcacagatgcctacgcagggaaggaatacatcatccaggtggcagccaaggacaatgagattgggacatggagtgactggagcgtggctgctcacgccacaccctggactgaggaacctcggcatctcacaacagaagcccaggcccccgagaccacgaccagcaccaccagctcattggcacccccacccaccacgaagatctgtgaccctggggagcttggcagcggcggaggaccctccatactcttcttgaccagtgtcccagtcactctggtcctggctgccgctgctgccacagccaacaatctcctgatctgagccctgcatcccacgaggacatgccagagcgcctgcggaggagcaggaggccggagctgagcctgcagaccccggtttctattttgcacacgggcaggaggaccttttgcattctcttcagacacaatttgtagagaccccggcaggcccgggcctgccttccgtccccccagcctcatctcaccaagccggccctcctttccatccagagaggaggaccatgcagctaacccacccaccaaagacccctctcatctttcccccctcgggctggaccctccaacgccagcgactcccaggagcccttgggggacctgaggggagcccccaccccacatccacagttttctcctcctgccccagcctcctgtctgtcccagggtctttgttgccaccatcagattataagctcctgacactgggggggcccagccatccccctccccccggtgcccacacttttcagtccttccacctttgcccctgttttgtacgatcctccattggccctttcctaccccccagtatttaatgtcctgtcagtcccttctagtctgactcaatggtaacttgctgtatttgaattttttatagatgtatatacatgggagggaggggtagggagttctcattaaacgtcaccatttcatgagaaaaaaaaaaaaaaaaaaaaaaaa

SEQ ID NO: 127 - DNA, 679 bp, Mus musculus
dgcgcgcgtgcccgcgcctgcgtgtgttcccatcaccaacgctccgtatttcgtcgcccttcctgcattccttcccgcagccgactagttagggtctgtatcctggggagctgagaaccctgccccgtcacatcatcccaggaagactttggtctggagaggaggataatattgatgtgtgtggagaacagctggtggtaacgagatggctgcttctgtcccatgggcctgctgtgctgtgcttgccgctgccgccgccgctgtctacacgcagaaacacagtccacaggaggcaccccacgtgcagtatgagcgtctgggcgcagatgtgacgctgccgtgtgggacagcgagctgggacgcagctgtgacatggagggtaaacgggacagatctggcccctgacctgctcaacggctctcagctgatactgcgaagcttagaactgggccacagtggcctatacgcctgtttccaccgtgactcctggcacctgcgccaccaagtccttctacatgtgggtttggctgggcttcagtctccctagactcagatccaagatgtgaatctaaagacaagctgtttagttttcaactgatggaaacctcgaggagtggcgaggagacacagaggagggaagttaagttgttaataaaataaaaaatgagtagttagcagg

SEQ ID NO: 128 - DNA, 1333 bp, Rattus novergicus
dcaacacatcatcccaggaagactttggtctgcagaggaggataatattgatgtgcttggagagcatctggtggtaacgagatggctgcttctgtcccttgggcctgctgtgctgtgcttgccgctgccgctgccgctgtctacacccagaaacacagtccacaggaggcaccccatgttcagtatgagcgtctgggcacagatgtgacgctgccatgtgggacagcaagttgggacgcagctgtgacctggagggtaaatggaacagatctggcccctgacctgctcaatggctctcagctgatactacgaagcttagaactgggccacagtggcctgtatgcctgtttccaccgtgactcctggcacctgcgccaccaagtccttctgcatgtgggtttgccgcctcgggaacccgtgctcagctgccgttccaacacttaccccaagggcttctactgcagctggcacctgtccgcccccacctacatccccaataccttcaatgtgactgtactgcatggctccaaaatgatggtctgtgagaaggacccagccctcaagaaccgctgtcacattcggtacatgcacctgttctcaaccatcaagtacaaggtctccataagtgtcagcaacgccttgggtcacaacaccacggctatcaccttcgacgaattcaccattgtgaagcccgatcctccagaaaatgtggtggcccggccagtgcccagcaacccccgtcgactggaggtgacatggcagaccccctcaacttggcctgatcccgaatcctttccactcaagttttttctgcgctaccggcctctcatcctggatcaatggcagcatgtggagctctcgaatggcacagcccacaccatcacggatgcctatgctgggaaggagtacatcatccaggtggccgccaaggacaatgagattgggacatggagtgactggagtgtggctgctcacgccacaccctggactgaggaaccacggcatctcaccactgaagcccaggcccccgagaccacgaccagcaccaccagctccttggcacccccacccaccacgaagatctgtgaccccggggagctcagcagcggcggaggaccctccatacccttcttgaccagtgtccctgtcactctggtcctggctgccgctgctgccacagccaacaatctcctgatctgagccctgcatcccatgaggacacgccagacgcctacagaggagcaggaggccggagctgagcctgcagaccccggtttctattttgcacacgggcaggaggaccttttgcattctcttcagacacaatttgtag

SEQ ID NO: 129 - protein, 373 aa, Homo sapiens
PMAAPVPWACCAVLAAAAAVVYAQRHSPQEAPHVQYERLGSDVTLPCGTANWDAAVTWRVNGTDLAPDLLNGSQLVLHGLELGHSGLYACFHRDSWHLRHQVLLHVGLPPREPVLSCRSNTYPKGFYCSWHLPTPTYIPNTFNVTVLHGSKIMVCEKDPALKNRCHIRYMHLFSTIKYKVSISVSNALGHNATAITFDEFTIVKPDPPENVVARPVPSNPRRLEVTWQTPSTWPDPESFPLKFFLRYRPLILDQWQHVELSDGTAHTITDAYAGKEYIIQVAAKDNEIGTWSDWSVAAHATPWTEEPRHLTTEAQAAETTTSTTSSLAPPPTTKICDPGELGSGGGPSAPFLVSVPITLALAAAAATASSLLI

SEQ ID NO: 130 - protein, 373 aa, Mus musculus
PMAASVPWACCAVLAAAAAAVYTQKHSPQEAPHVQYERLGADVTLPCGTASWDAAVTWRVNGTDLAPDLLNGSQLILRSLELGHSGLYACFHRDSWHLRHQVLLHVGLPPREPVLSCRSNTYPKGFYCSWHLPTPTYIPNTFNVTVLHGSKIMVCEKDPALKNRCHIRYMHLFSTIKYKVSISVSNALGHNTTAITFDEFTIVKPDPPENVVARPVPSNPRRLEVTWQTPSTWPDPESFPLKFFLRYRPLILDQWQHVELSDGTAHTITDAYAGKEYIIQVAAKDNEIGTWSDWSVAAHATPWTEEPRHLTTEAQAPETTTSTTSSLAPPPTTKICDPGELGSGGGPSILFLTSVPVTLVLAAAAATANNLLI

SEQ ID NO: 131 - protein, 114 aa, Mus musculus
PMAASVPWACCAVLAAAAAAVYTQKHSPQEAPHVQYERLGADVTLPCGTASWDAAVTWRVNGTDLAPDLLNGSQLILRSLELGHSGLYACFHRDSWHLRHQVLLHVGLAGLQSP

SEQ ID NO: 132 - protein, 131 aa, Rattus novergicus
PMRTRQTPTEEQEAGAEPADPGFYFAHGQEDLLHSLQTQFVETPAGPGLPSVPLASSHQAGSPFHPERRAMQLTHPPKTPLILPLGLDPPTPATPRSPWGNLRGAPTPYLQFPPPAPASCLSQGLCCTIRL

SEQ ID NO: 133 - protein, 373 aa, Rattus novergicus
PMAASVPWACCAVLAAAAAAVYTQKHSPQEAPHVQYERLGTDVTLPCGTASWDAAVTWRVNGTDLAPDLLNGSQLILRSLELGHSGLYACFHRDSWHLRHQVLLHVGLPPREPVLSCRSNTYPKGFYCSWHLSAPTYIPNTFNVTVLHGSKMMVCEKDPALKNRCHIRYMHLFSTIKYKVSISVSNALGHNTTAITFDEFTIVKPDPPENVVARPVPSNPRRLEVTWQTPSTWPDPESFPLKFFLRYRPLILDQWQHVELSDGTAHTITDAYAGKEYIIQVAAKDNEIGTWSDWSVAAHATPWTEEPRHLTTEAQAPETTTSTTSSLAPPPTTKICDPGELSSGGGPSIPFLTSVPVTLVLAAAAATANNLLI

SEQ ID NO: 134 - DNA, 643 bp, Homo sapiens
dtgcatcgttagcttctcctgataaactaattgcctcacattgtcactgcaaatcgacacctattaatgggtctcacctcccaactgcttccccctctgttcttcctgctagcatgtgccggcaactttgtccacggacacaagtgcgatatcaccttacaggagatcatcaaaactttgaacagcctcacagagcagaagactctgtgcaccgagttgaccgtaacagacatctttgctgcctccaagaacacaactgagaaggaaaccttctgcagggctgcgactgtgctccggcagttctacagccaccatgagaaggacactcgctgcctgggtgcgactgcacagcagttccacaggcacaagcagctgatccgattcctgaaacggctcgacaggaacctctggggcctggcgggcttgaattcctgtcctgtgaaggaagccaaccagagtacgttggaaaacttcttggaaaggctaaagacgatcatgagagagaaatattcaaagtgttcgagctgaatattttaatttatgagtttttgatagctttattttttaagtatttatatatttataactcatcataaaataaagtatatatagaatctaaaaaaaaaaaaaaaaaaaaaaaaaa

SEQ ID NO: 135 - DNA, 606 bp, Mus musculus
dttgttagcatctcttgataaacttaattgtctctcgtcactgacggcacagagctattgatgggtctcaacccccagctagttgtcatcctgctcttctttctcgaatgtaccaggagccatatccacggatgcgacaaaaatcacttgagagagatcatcggcattttgaacgaggtcacaggagaagggacgccatgcacggagatggatgtgccaaacgtcctcacagcaacgaagaacaccacagagagtgagctcgtctgtagggcttccaaggtgcttcgcatattttatttaaaacatgggaaaactccatgcttgaagaagaactctagtgttctcatggagctgcagagactctttcgggcttttcgatgcctggattcatcgataagctgcaccatgaatgagtccaagtccacatcactgaaagacttcctggaaagcctaaagagcatcatgcaaatggattactcgtagtactgagccaccatgctttaacttatgaatttttaatggttttatttttaatatttatatatttataattcataaaataaaatatttgtataatgtaacagaaaaaaaaaaaaaaaaaaaaaa

SEQ ID NO: 136 - DNA, 476 bp, Rattus novergicus
dtctcacgtcactgactgtagagagctattgatgggtctcagcccccaccttgctgtcaccctgttctgctttctcatatgtaccgggaacggtatccacggatgtaacgacagccctctgagagagatcatcaacactttgaaccaggtcacagaaaaagggactccatgcaccgagatgtttgtaccagacgtccttacggcaacaaggaacaccacggagaacgagctcatctgcagggcttccagggtgcttcgcaaattttacttcccacgtgatgtacctccgtgcttgaagaacaagtctggggttctcggtgaactgaggaaactctgtagaggtgtcagcggtctgaactcactgagaagctgcaccgtgaatgagtccacgctcacaacactgaaagacttcctggaaagcctaaaaagcatcctacgagggaaatacttgcagtcctgcacttccatgtcctaac

SEQ ID NO: 137 - protein, 154 aa, Homo sapiens
PMGLTSQLLPPLFFLLACAGNFVHGHKCDITLQEIIKTLNSLTEQKTLCTELTVTDIFAASKNTTEKETFCRAATVLRQFYSHHEKDTRCLGATAQQFHRHKQLIRFLKRLDRNLWGLAGLNSCPVKEANQSTLENFLERLKTIMREKYSKCSS

SEQ ID NO: 138 - protein, 11 aa, Homo sapiens
PMGLTSQLLPP

SEQ ID NO: 139 - protein, 141 aa, Mus musculus
PMGLNPQLVVILLFFLECTRSHIHGCDKNHLREIIGILNEVTGEGTPCTEMDVPNVLTATKNTTESELVCRASKVLRIFYLKHGKTPCLKKNSSVLMELQRLFRAFRCLDSSISCTMNESKSTSLKDFLESLKSIMQMDYS

SEQ ID NO: 140 - protein, 61 aa, Mus musculus
PMGLNPQLVVILLFFLECTRSHIHGCDKNHLREIIGILNEVTGEGTPCTEMDVPNVLTATK

SEQ ID NO: 141 - protein, 148 aa, Rattus novergicus
PMGLSPHLAVTLFCFLICTGNGIHGCNDSPLREIINTLNQVTEKGTPCTEMFVPDVLTATRNTTENELICRASRVLRKFYFPRDVPPCLKNKSGVLGELRKLCRGVSGLNSLRSCTVNESTLTTLKDFLESLKSILRGKYLQSCTSMS

SEQ ID NO: 142 - DNA, 3711 bp, Homo sapiens
dgggtctccgcgcccaggaaagccccgcgcggcgcgggccagggaagggccacccaggggtcccccacttcccgcttgggcgcccggacggcgaatggagcaggggcgcgcagataattaaagatttacacacagctggaagaaatcatagagaagccgggcgtggtggctcatgcctataatcccagcacttttggaggctgaggcgggcagatcacttgagatcaggagttcgagaccagcctggtgccttggcatctcccaatggggtggctttgctctgggctcctgttccctgtgagctgcctggtcctgctgcaggtggcaagctctgggaacatgaaggtcttgcaggagcccacctgcgtctccgactacatgagcatctctacttgcgagtggaagatgaatggtcccaccaattgcagcaccgagctccgcctgttgtaccagctggtttttctgctctccgaagcccacacgtgtatccctgagaacaacggaggcgcggggtgcgtgtgccacctgctcatggatgacgtggtcagtgcggataactatacactggacctgtgggctgggcagcagctgctgtggaagggctccttcaagcccagcgagcatgtgaaacccagggccccaggaaacctgacagttcacaccaatgtctccgacactctgctgctgacctggagcaacccgtatccccctgacaattacctgtataatcatctcacctatgcagtcaacatttggagtgaaaacgacccggcagatttcagaatctataacgtgacctacctagaaccctccctccgcatcgcagccagcaccctgaagtctgggatttcctacagggcacgggtgagggcctgggctcagtgctataacaccacctggagtgagtggagccccagcaccaagtggcacaactcctacagggagcccttcgagcagcacctcctgctgggcgtcagcgtttcctgcattgtcatcctggccgtctgcctgttgtgctatgtcagcatcaccaagattaagaaagaatggtgggatcagattcccaacccagcccgcagccgcctcgtggctataataatccaggatgctcaggggtcacagtgggagaagcggtcccgaggccaggaaccagccaagtgcccacactggaagaattgtcttaccaagctcttgccctgttttctggagcacaacatgaaaagggatgaagatcctcacaaggctgccaaagagatgcctttccagggctctggaaaatcagcatggtgcccagtggagatcagcaagacagtcctctggccagagagcatcagcgtggtgcgatgtgtggagttgtttgaggccccggtggagtgtgaggaggaggaggaggtagaggaagaaaaagggagcttctgtgcatcgcctgagagcagcagggatgacttccaggagggaagggagggcattgtggcccggctaacagagagcctgttcctggacctgctcggagaggagaatgggggcttttgccagcaggacatgggggagtcatgccttcttccaccttcgggaagtacgagtgctcacatgccctgggatgagttcccaagtgcagggcccaaggaggcacctccctggggcaaggagcagcctctccacctggagccaagtcctcctgccagcccgacccagagtccagacaacctgacttgcacagagacgcccctcgtcatcgcaggcaaccctgcttaccgcagcttcagcaactccctgagccagtcaccgtgtcccagagagctgggtccagacccactgctggccagacacctggaggaagtagaacccgagatgccctgtgtcccccagctctctgagccaaccactgtgccccaacctgagccagaaacctgggagcagatcctccgccgaaatgtcctccagcatggggcagctgcagcccccgtctcggcccccaccagtggctatcaggagtttgtacatgcggtggagcagggtggcacccaggccagtgcggtggtgggcttgggtcccccaggagaggctggttacaaggccttctcaagcctgcttgccagcagtgctgtgtccccagagaaatgtgggtttggggctagcagtggggaagaggggtataagcctttccaagacctcattcctggctgccctggggaccctgccccagtccctgtccccttgttcacctttggactggacagggagccacctcgcagtccgcagagctcacatctcccaagcagctccccagagcacctgggtctggagccgggggaaaaggtagaggacatgccaaagcccccacttccccaggagcaggccacagacccccttgtggacagcctgggcagtggcattgtctactcagcccttacctgccacctgtgcggccacctgaaacagtgtcatggccaggaggatggtggccagacccctgtcatggccagtccttgctgtggctgctgctgtggagacaggtcctcgccccctacaacccccctgagggccccagacccctctccaggtggggttccactggaggccagtctgtgtccggcctccctggcaccctcgggcatctcagagaagagtaaatcctcatcatccttccatcctgcccctggcaatgctcagagctcaagccagacccccaaaatcgtgaactttgtctccgtgggacccacatacatgagggtctcttaggtgcatgtcctcttgttgctgagtctgcagatgaggactagggcttatccatgcctgggaaatgccacctcctggaaggcagccaggctggcagatttccaaaagacttgaagaaccatggtatgaaggtgattggccccactgacgttggcctaacactgggctgcagagactggaccccgcccagcattgggctgggctcgccacatcccatgagagtagagggcactgggtcgccgtgccccacggcaggcccctgcaggaaaactgaggcccttgggcacctcgacttgtgaacgagttgttggctgctccctccacagcttctgcagcagactgtccctgttgtaactgcccaaggcatgttttgcccaccagatcatggcccacgtggaggcccacctgcctctgtctcactgaactagaagccgagcctagaaactaacacagccatcaagggaatgacttgggcggccttgggaaatcgatgagaaattgaacttcagggagggtggtcattgcctagaggtgctcattcatttaacagagcttccttaggttgatgctggaggcagaatcccggctgtcaaggggtgttcagttaaggggagcaacagaggacatgaaaaattgctatgactaaagcagggacaatttgctgccaaacacccatgcccagctgtatggctgggggctcctcgtatgcatggaacccccagaataaatatgctcagccaccctgtgggccgggcaatccagacagcaggcataaggcaccagttaccctgcatgttggcccagacctcaggtgctagggaaggcgggaaccttgggttgagtaatgctcgtctgtgtgttttagtttcatcacctgttatctgtgtttgctgaggagagtggaacagaaggggtggagttttgtataaataaagtttctttgtctctttaaaaaaaaaaaaaaaaaaaaaa

SEQ ID NO: 143 - DNA, 3578 bp, Homo sapiens
dgggtctccgcgcccaggaaagccccgcgcggcgcgggccagggaagggccacccaggggtcccccacttcccgcttgggcgcccggacggcgaatggagcaggggcgcgcaggtgccttggcatctcccaatggggtggctttgctctgggctcctgttccctgtgagctgcctggtcctgctgcaggtggcaagctctgggaacatgaaggtcttgcaggagcccacctgcgtctccgactacatgagcatctctacttgcgagtggaagatgaatggtcccaccaattgcagcaccgagctccgcctgttgtaccagctggtttttctgctctccgaagcccacacgtgtatccctgagaacaacggaggcgcggggtgcgtgtgccacctgctcatggatgacgtggtcagtgcggataactatacactggacctgtgggctgggcagcagctgctgtggaagggctccttcaagcccagcgagcatgtgaaacccagggccccaggaaacctgacagttcacaccaatgtctccgacactctgctgctgacctggagcaacccgtatccccctgacaattacctgtataatcatctcacctatgcagtcaacatttggagtgaaaacgacccggcagatttcagaatctataacgtgacctacctagaaccctccctccgcatcgcagccagcaccctgaagtctgggatttcctacagggcacgggtgagggcctgggctcagtgctataacaccacctggagtgagtggagccccagcaccaagtggcacaactcctacagggagcccttcgagcagcacctcctgctgggcgtcagcgtttcctgcattgtcatcctggccgtctgcctgttgtgctatgtcagcatcaccaagattaagaaagaatggtgggatcagattcccaacccagcccgcagccgcctcgtggctataataatccaggatgctcaggggtcacagtgggagaagcggtcccgaggccaggaaccagccaagtgcccacactggaagaattgtcttaccaagctcttgccctgttttctggagcacaacatgaaaagggatgaagatcctcacaaggctgccaaagagatgcctttccagggctctggaaaatcagcatggtgcccagtggagatcagcaagacagtcctctggccagagagcatcagcgtggtgcgatgtgtggagttgtttgaggccccggtggagtgtgaggaggaggaggaggtagaggaagaaaaagggagcttctgtgcatcgcctgagagcagcagggatgacttccaggagggaagggagggcattgtggcccggctaacagagagcctgttcctggacctgctcggagaggagaatgggggcttttgccagcaggacatgggggagtcatgccttcttccaccttcgggaagtacgagtgctcacatgccctgggatgagttcccaagtgcagggcccaaggaggcacctccctggggcaaggagcagcctctccacctggagccaagtcctcctgccagcccgacccagagtccagacaacctgacttgcacagagacgcccctcgtcatcgcaggcaaccctgcttaccgcagcttcagcaactccctgagccagtcaccgtgtcccagagagctgggtccagacccactgctggccagacacctggaggaagtagaacccgagatgccctgtgtcccccagctctctgagccaaccactgtgccccaacctgagccagaaacctgggagcagatcctccgccgaaatgtcctccagcatggggcagctgcagcccccgtctcggcccccaccagtggctatcaggagtttgtacatgcggtggagcagggtggcacccaggccagtgcggtggtgggcttgggtcccccaggagaggctggttacaaggccttctcaagcctgcttgccagcagtgctgtgtccccagagaaatgtgggtttggggctagcagtggggaagaggggtataagcctttccaagacctcattcctggctgccctggggaccctgccccagtccctgtccccttgttcacctttggactggacagggagccacctcgcagtccgcagagctcacatctcccaagcagctccccagagcacctgggtctggagccgggggaaaaggtagaggacatgccaaagcccccacttccccaggagcaggccacagacccccttgtggacagcctgggcagtggcattgtctactcagcccttacctgccacctgtgcggccacctgaaacagtgtcatggccaggaggatggtggccagacccctgtcatggccagtccttgctgtggctgctgctgtggagacaggtcctcgccccctacaacccccctgagggccccagacccctctccaggtggggttccactggaggccagtctgtgtccggcctccctggcaccctcgggcatctcagagaagagtaaatcctcatcatccttccatcctgcccctggcaatgctcagagctcaagccagacccccaaaatcgtgaactttgtctccgtgggacccacatacatgagggtctcttaggtgcatgtcctcttgttgctgagtctgcagatgaggactagggcttatccatgcctgggaaatgccacctcctggaaggcagccaggctggcagatttccaaaagacttgaagaaccatggtatgaaggtgattggccccactgacgttggcctaacactgggctgcagagactggaccccgcccagcattgggctgggctcgccacatcccatgagagtagagggcactgggtcgccgtgccccacggcaggcccctgcaggaaaactgaggcccttgggcacctcgacttgtgaacgagttgttggctgctccctccacagcttctgcagcagactgtccctgttgtaactgcccaaggcatgttttgcccaccagatcatggcccacgtggaggcccacctgcctctgtctcactgaactagaagccgagcctagaaactaacacagccatcaagggaatgacttgggcggccttgggaaatcgatgagaaattgaacttcagggagggtggtcattgcctagaggtgctcattcatttaacagagcttccttaggttgatgctggaggcagaatcccggctgtcaaggggtgttcagttaaggggagcaacagaggacatgaaaaattgctatgactaaagcagggacaatttgctgccaaacacccatgcccagctgtatggctgggggctcctcgtatgcatggaacccccagaataaatatgctcagccaccctgtgggccgggcaatccagacagcaggcataaggcaccagttaccctgcatgttggcccagacctcaggtgctagggaaggcgggaaccttgggttgagtaatgctcgtctgtgtgttttagtttcatcacctgttatctgtgtttgctgaggagagtggaacagaaggggtggagttttgtataaataaagtttctttgtctctttaaaaaaaaaaaaaaaaaaaaaa

SEQ ID NO: 144 - DNA, 3822 bp, Homo sapiens
dgggtctccgcgcccaggaaagccccgcgcggcgcgggccagggaagggccacccaggggtcccccacttcccgcttgggcgcccggacggcgaatggagcaggggcgcgcaggtgccttggcatctcccaatggggtggctttgctctgggctcctgttccctgtgagctgcctggtcctgctgcaggtggcaagctctggactcttcaggatgccgtgtggagaaaggaagagggtggaagccaggaggtctggagggaggtctggagtggaggagatgagaggctccggatccctctgggaggtagatttgaggacagattggaattgaggtgaaagacagagaaagagaagtggccaggatgactccaagatttctgacctaaactactgggaaggacgcggttgtcatttctgaaatgcagaaggatgccagaagagaagggaacatgaaggtcttgcaggagcccacctgcgtctccgactacatgagcatctctacttgcgagtggaagatgaatggtcccaccaattgcagcaccgagctccgcctgttgtaccagctggtttttctgctctccgaagcccacacgtgtatccctgagaacaacggaggcgcggggtgcgtgtgccacctgctcatggatgacgtggtcagtgcggataactatacactggacctgtgggctgggcagcagctgctgtggaagggctccttcaagcccagcgagcatgtgaaacccagggccccaggaaacctgacagttcacaccaatgtctccgacactctgctgctgacctggagcaacccgtatccccctgacaattacctgtataatcatctcacctatgcagtcaacatttggagtgaaaacgacccggcagatttcagaatctataacgtgacctacctagaaccctccctccgcatcgcagccagcaccctgaagtctgggatttcctacagggcacgggtgagggcctgggctcagtgctataacaccacctggagtgagtggagccccagcaccaagtggcacaactcctacagggagcccttcgagcagcacctcctgctgggcgtcagcgtttcctgcattgtcatcctggccgtctgcctgttgtgctatgtcagcatcaccaagattaagaaagaatggtgggatcagattcccaacccagcccgcagccgcctcgtggctataataatccaggatgctcaggggtcacagtgggagaagcggtcccgaggccaggaaccagccaagtgcccacactggaagaattgtcttaccaagctcttgccctgttttctggagcacaacatgaaaagggatgaagatcctcacaaggctgccaaagagatgcctttccagggctctggaaaatcagcatggtgcccagtggagatcagcaagacagtcctctggccagagagcatcagcgtggtgcgatgtgtggagttgtttgaggccccggtggagtgtgaggaggaggaggaggtagaggaagaaaaagggagcttctgtgcatcgcctgagagcagcagggatgacttccaggagggaagggagggcattgtggcccggctaacagagagcctgttcctggacctgctcggagaggagaatgggggcttttgccagcaggacatgggggagtcatgccttcttccaccttcgggaagtacgagtgctcacatgccctgggatgagttcccaagtgcagggcccaaggaggcacctccctggggcaaggagcagcctctccacctggagccaagtcctcctgccagcccgacccagagtccagacaacctgacttgcacagagacgcccctcgtcatcgcaggcaaccctgcttaccgcagcttcagcaactccctgagccagtcaccgtgtcccagagagctgggtccagacccactgctggccagacacctggaggaagtagaacccgagatgccctgtgtcccccagctctctgagccaaccactgtgccccaacctgagccagaaacctgggagcagatcctccgccgaaatgtcctccagcatggggcagctgcagcccccgtctcggcccccaccagtggctatcaggagtttgtacatgcggtggagcagggtggcacccaggccagtgcggtggtgggcttgggtcccccaggagaggctggttacaaggccttctcaagcctgcttgccagcagtgctgtgtccccagagaaatgtgggtttggggctagcagtggggaagaggggtataagcctttccaagacctcattcctggctgccctggggaccctgccccagtccctgtccccttgttcacctttggactggacagggagccacctcgcagtccgcagagctcacatctcccaagcagctccccagagcacctgggtctggagccgggggaaaaggtagaggacatgccaaagcccccacttccccaggagcaggccacagacccccttgtggacagcctgggcagtggcattgtctactcagcccttacctgccacctgtgcggccacctgaaacagtgtcatggccaggaggatggtggccagacccctgtcatggccagtccttgctgtggctgctgctgtggagacaggtcctcgccccctacaacccccctgagggccccagacccctctccaggtggggttccactggaggccagtctgtgtccggcctccctggcaccctcgggcatctcagagaagagtaaatcctcatcatccttccatcctgcccctggcaatgctcagagctcaagccagacccccaaaatcgtgaactttgtctccgtgggacccacatacatgagggtctcttaggtgcatgtcctcttgttgctgagtctgcagatgaggactagggcttatccatgcctgggaaatgccacctcctggaaggcagccaggctggcagatttccaaaagacttgaagaaccatggtatgaaggtgattggccccactgacgttggcctaacactgggctgcagagactggaccccgcccagcattgggctgggctcgccacatcccatgagagtagagggcactgggtcgccgtgccccacggcaggcccctgcaggaaaactgaggcccttgggcacctcgacttgtgaacgagttgttggctgctccctccacagcttctgcagcagactgtccctgttgtaactgcccaaggcatgttttgcccaccagatcatggcccacgtggaggcccacctgcctctgtctcactgaactagaagccgagcctagaaactaacacagccatcaagggaatgacttgggcggccttgggaaatcgatgagaaattgaacttcagggagggtggtcattgcctagaggtgctcattcatttaacagagcttccttaggttgatgctggaggcagaatcccggctgtcaaggggtgttcagttaaggggagcaacagaggacatgaaaaattgctatgactaaagcagggacaatttgctgccaaacacccatgcccagctgtatggctgggggctcctcgtatgcatggaacccccagaataaatatgctcagccaccctgtgggccgggcaatccagacagcaggcataaggcaccagttaccctgcatgttggcccagacctcaggtgctagggaaggcgggaaccttgggttgagtaatgctcgtctgtgtgttttagtttcatcacctgttatctgtgtttgctgaggagagtggaacagaaggggtggagttttgtataaataaagtttctttgtctctttaaaaaaaaaaaaaaaaaaaaaa

SEQ ID NO: 145 - DNA, 3590 bp, Homo sapiens
dgggtctccgcgcccaggaaagccccgcgcggcgcgggccagggaagggccacccaggggtcccccacttcccgcttgggcgcccggacggcgaatggagcaggggcgcgcaggtgccttggcatctcccaatggggtggctttgctctgggctcctgttccctgtgagctgcctggtcctgctgcaggtggcaagctctgggaacatgaaggtcttgcaggagcccacctgcgtctccgactacatgagcatctctacttgcgagtggaagatgaatggtcccaccaattgcagcaccgagctccgcctgttgtaccagctggtttttctgctctccgaagcccacacgtgtatccctgagaacaacggaggcgcggggtgcgtgtgccacctgctcatggatgacgtggtcagtgcggataactatacactggacctgtgggctgggcagcagctgctgtggaagggctccttcaagcccagcgagcatgtgaaacccagggccccaggaaacctgacagttcacaccaatgtctccgacactctgctgctgacctggagcaacccgtatccccctgacaattacctgtataatcatctcacctatgcagtcaacatttggagtgaaaacgacccggcagataatctataacgtgacctacctagaaccctccctccgcatcgcagccagcaccctgaagtctgggatttcctacagggcacgggtgagggcctgggctcagtgctataacaccacctggagtgagtggagccccagcaccaagtggcacaactcctacagggagcccttcgagcagcacctcctgctgggcgtcagcgtttcctgcattgtcatcctggccgtctgcctgttgtgctatgtcagcatcaccaagattaagaaagaatggtgggatcagattcccaacccagcccgcagccgcctcgtggctataataatccaggatgctcaggggtcacagtgggagaagcggtcccgaggccaggaaccagccaagtgcccacactggaagaattgtcttaccaagctcttgccctgttttctggagcacaacatgaaaagggatgaagatcctcacaaggctgccaaagagatgcctttccagggctctggaaaatcagcatggtgcccagtggagatcagcaagacagtcctctggccagagagcatcagcgtggtgcgatgtgtggagttgtttgaggccccggtggagtgtgaggaggaggaggaggtagaggaagaaaaagggagcttctgtgcatcgcctgagagcagcagggatgacttccaggagggaagggagggcattgtggcccggctaacagagagcctgttcctggacctgctcggagaggagaatgggggcttttgccagcaggacatgggggagtcatgccttcttccaccttcgggaagtacgagtgctcacatgccctgggatgagttcccaagtgcagggcccaaggaggcacctccctggggcaaggagcagcctctccacctggagccaagtcctcctgccagcccgacccagagtccagacaacctgacttgcacagagacgcccctcgtcatcgcaggcaaccctgcttaccgcagcttcagcaactccctgagccagtcaccgtgtcccagagagctgggtccagacccactgctggccagacacctggaggaagtagaacccgagatgccctgtgtcccccagctctctgagccaaccactgtgccccaacctgagccagaaacctgggagcagatcctccgccgaaatgtcctccagcatggggcagctgcagcccccgtctcggcccccaccagtggctatcaggagtttgtacatgcggtggagcagggtggcacccaggccagtgcggtggtgggcttgggtcccccaggagaggctggttacaaggccttctcaagcctgcttgccagcagtgctgtgtccccagagaaatgtgggtttggggctagcagtggggaagaggggtataagcctttccaagacctcattcctggctgccctggggaccctgccccagtccctgtccccttgttcacctttggactggacagggagccacctcgcagtccgcagagctcacatctcccaagcagctccccagagcacctgggtctggagccgggggaaaaggtagaggacatgccaaagcccccacttccccaggagcaggccacagacccccttgtggacagcctgggcagtggcattgtctactcagcccttacctgccacctgtgcggccacctgaaacagtgtcatggccaggaggatggtggccagacccctgtcatggccagtccttgctgtggctgctgctgtggagacaggtcctcgccccctacaacccccctgagggccccagacccctctccaggtggggttccactggaggccagtctgtgtccggcctccctggcaccctcgggcatctcagagaagagtaaatcctcatcatccttccatcctgcccctggcaatgctcagagctcaagccagacccccaaaatcgtgaactttgtctccgtgggacccacatacatgagggtctcttaggtgcatgtcctcttgttgctgagtctgcagatgaggactagggcttatccatgcctgggaaatgccacctcctggaaggcagccaggctggcagatttccaaaagacttgaagaaccatggtatgaaggtgattggccccactgacgttggcctaacactgggctgcagagactggaccccgcccagcattgggctgggctcgccacatcccatgagagtagagggcactgggtcgccgtgccccacggcaggcccctgcaggaaaactgaggcccttgggcacctcgacttgtgaacgagttgttggctgctccctccacagcttctgcagcagactgtccctgttgtaactgcccaaggcatgttttgcccaccagatcatggcccacgtggaggcccacctgcctctgtctcactgaactagaagccgagcctagaaactaacacagccatcaagggaatgacttgggcggccttgggaaatcgatgagaaattgaacttcagggagggtggtcattgcctagaggtgctcattcatttaacagagcttccttaggttgatgctggaggcagaatcccggctgtcaaggggtgttcagttaaggggagcaacagaggacatgaaaaattgctatgactaaagcagggacaatttgctgccaaacacccatgcccagctgtatggctgggggctcctcgtatgcatggaacccccagaataaatatgctcagccaccctgtgggccgggcaatccagacagcaggcataaggcaccagttaccctgcatgttggcccagacctcaggtgctagggaaggcgggaaccttgggttgagtaatgctcgtctgtgtgttttagtttcatcacctgttatctgtgtttgctgaggagagtggaacagaaggggtggagttttgtataaataaagtttctttgtctctttaaaaaaaaaaaaaaaaaaaaaaaaaaaaaaaaaaaaaaa

SEQ ID NO: 146 - DNA, 3566 bp, Mus musculus
dgcgcggcgtggagcctgaactcgcaggttctggctggacttctcgaagctgaggagaagcagagggacctggcttctgattttggatctgcgtgcttgctggttctggcgcctgctggtcttgttcctgtaacctaggactcggggcttgcacatgctttttttttgaagttgctggagagggagcccaggaccttgtgcaggcaccttttgtgtccccaatggggcggctttgcaccaagttcctgacctctgtgggctgtctgattttgctgttggtgactggatctgggagcatcaaggtcctgggtgagcccacctgcttctctgactacatccgcacttccacgtgtgagtggttcctggatagcgctgtggactgcagttctcagctctgcctacactacaggctgatgttcttcgagttctctgaaaacctcacatgcatcccgaggaacagtgccagcactgtgtgtgtgtgccacatggaaatgaataggccggtccaatcagacagataccagatggaactgtgggctgagcacagacagctgtggcagggctccttcagccccagtggtaatgtgaagcccctagctccagacaacctcacactccacaccaatgtgtccgacgaatggctgctgacctggaataacctgtacccatcgaacaacttactgtacaaagacctcatctccatggtcaacatctccagagaggacaaccctgcagaattcatagtctataatgtgacctacaaggaacccaggctgagcttcccgatcaacatcctgatgtcaggggtctactatacggcgcgtgtgagggtcagatcccagatactcactggcacctggagtgagtggagtcctagcatcacgtggtacaaccacttccagctgcccctgatacagcgccttccactgggggtcaccatctcctgcctctgcatcccgttgttttgcctgttctgttacttcagcattaccaagattaagaagatatggtgggaccagattcccaccccagcacgcagtcccttggtggccatcatcattcaggatgcacaggtgcccctctgggataagcagacccgaagccaggagtcaaccaagtacccgcactggaaaacttgtctagacaagctgctgccttgcttgctgaagcacagagtaaagaagaagacagacttcccgaaggctgccccaaccaagtctctccagagtcctggaaaggcaggctggtgtcccatggaggtcagcaggaccgtcctctggccagagaatgttagtgtcagtgtggtgcgctgtatggagctgtttgaggccccagtacagaatgtggaggaggaagaagatgagatagtcaaagaggacctgagcatgtcacctgagaacagcggaggctgcggcttccaggagagccaggcagacatcatggctcggctcactgagaacctgttttccgacttgttggaggctgagaatgggggccttggccagtcagccttggcagagtcatgctcccctctgccttcaggaagtgggcaggcttctgtatcctgggcctgcctccccatggggcccagtgaggaggccacatgccaggtcacagagcagccttcacacccaggccctctttcaggcagcccagcccagagtgcacctactctggcttgcacgcaggtcccacttgtccttgcagacaatcctgcctaccggagttttagtgactgctgtagcccggccccaaatcctggagagctggctccagagcagcagcaggctgatcatctggaagaagaggagcctccaagcccggctgacccccattcttcagggccaccaatgcagccagtggagagctgggagcagatccttcacatgagtgtcctgcagcatggggcagctgctggctccaccccagcccctgccggtggctaccaggagtttgtgcaggcagtgaagcagggtgccgcccaggatcctggggtgcctggtgtcaggccttctggagaccccggttacaaggccttctcgagcctgctcagcagcaatggcatccgcggggacacagcagcagcggggactgacgatgggcatggaggctacaagcccttccagaatcctgttcctaaccagtcccctagctccgtgcccttatttactttcggactagacacggagctgtcacccagtcctctgaactcagacccacccaaaagccccccagaatgccttggtctggagctggggctcaaaggaggtgactgggtgaaggcccctcctcctgcagatcaggtgcccaagccctttggggatgacctgggctttggtattgtgtactcgtccctcacttgccacttgtgtggccacctgaagcaacaccacagccaggaggaaggtggccagagccccatcgttgctagccctggctgtggctgctgctacgatgacagatcaccatccctggggagcctctcgggggccttggaaagctgtcctgagggaataccaccagaagccaacctcatgtcagcacccaagacaccctcaaacttgtcaggggagggcaagggccctggtcactctcctgttcccagccagacgaccgaggtgcctgtgggcgccctgggcattgctgtttcttaggtgagtgagtgtgctgttgttgctgaggtctgtgctgaggccagggttcctccaagccagggaagtacttcctgggagacagcccagctggcaggtttcccagaaatccagagaatggtgaattgaagatgtaaacttggcctgaccctggacgctcggagcctggctgtctcctcttccactggcctgggctctcctccctcccaagggatacaggggctcactgtgcttggtcccacagcagtgctgacgttcctaagtcctgggctttcctagctgatgttgtcctacctactcagtcccattttgtccaccgaatagacctgtcactcaaggctctcagcggtcctgccatagctgctggacgctcccagctggaagctgggcctagaaactcacagatggcctggcagtggcatgggaggccctaaaaattagtggaaattttgagagaggacaggtattgccccacagaggccattcattgaacagccaggactgggactagaggcagagcctgctgtcctccgctcagttgtagaaagcaacaaggacacaaacttgattgcccaaagtcactgccagttacccacatatgaccagaagccagggctcctgggatgtggaagataaacaaacacagttgccgggtggcagggcccagcgggcacgataactggcagtcaaggcgatacctcgagggaactgtggggctggtcctggttggtggtcaggtggtagggatagcagatggcagactttggtgagtgagtgagtctgactgtgttctggaagatgggaccgggctcagcactgtctgctcacgtccccactgttgcaacacctagtctgtttgcaaggaggacaggacaggtcacatggagctttatgtcaataaagtctttatcttgt

SEQ ID NO: 147 - DNA, 3515 bp, Rattus novergicus
dggcggcgtaggaaaccgggcgaggtccttcgcgcaggaaagccccgcacggcgcgtggagcctgaacacacaggtgctggagagggagcccaggatctgggggccaggtacgctgccactgagctgcattccagtctctccctgtatagcccaggcacctttgtgtccgcaatggggtggctttgcaccaagttcctgtcctccgtgagctgtctgattttgctatgggtgactggctctgggggcatcaaggtcctgggtgaccccacctgcttctctgactacatccgcacttctacgtgtgagtggcagctggatagcactgtggactgcagttctcagctcctcctggactacaggctgctctttgagttctctgaaaacctcacatgcacccccaagaacagtgccgacaccgtgtgtgtgtgccaaatggccatagaggagccgatccaggcagacacatactggctggaactgtggtctgagcggggacagctgtggcaaggctccttcaagcctagtgacaatgtgaagcccccagctccagacaacctcacactccacaccaatgtctccaatgcgctgctgctgatgtggagcaacccatacccatcgaacaacttcctgcacaaaggcctcatctgcatggtcaacatctccagagaggacaacccggcggaattcaaagtctataatgtgacctacacggaacccaagctgagcttcccagtcaacaccctaacatcaggggtgcgctatagggcacgtgtgagggtcttgtcccagagcttccctggcatctggagtgagtggagtcccagcatcacgtggtacaaccacttccagctgcccctgctgcagcgcctcccgctgggtgtcagcatctcctgcatctgcatcctattgttttgcctgacctgttacttcagcattatcaagattaagaagatatggtgggaccagattcccactccagcacgcagtcccttagcagccatcatcattcaggacacgaaggtgtccctctgggagaagcagacccgaagccaggagtcaaccaagagccggcactggaagacttgtctaaccaagctgctgccctgcttgctggagcatagagtgaagaaagagagagaatccccgaaggctgccaaaaccaagcctctccagagtcctgaaaaagcaggctggtatcctgcggaggtcagcaggaccgtcctctggccagagaacgttcatgtcagtgtggtgcgctgtatggagctgtttgaggccccagtacagaatgtggaggaggaagaggatgagatggtcaaaggggacctgagcatgtcacctgagaacagcggagggggcttccaggagagtcaggcagacatcatggcccggctcactgagaacctgttttcagacttgctgggggctgagaatggaggcgttggccagtcgagcatggcagagtcatcctcccttctgccttcagaaagtgggcaagcttctacgtcctgggcctgcttccccacggggcccagtgagaccacatgccaggtcacagggcagcagcctccacacccagaccctgagagagcaactggcacagcctgcacacaggtcccccttgtcatttcagacaatcctgcctaccggagttttagtgacttctccagccccgccccaaatcctggagagctggcttcagaacagaagcaggctggacatctggaagaaggggatcttctgagcccggttgacccccattcttcagggccaccaatgcagcaagcggagagctgggagcagatccttcacatgagtgtcctgcagcacgggacagctggctccaccccagcccctaccagtggctaccaagagtttgtgcaggcagtgaagcagggtgcgtcccaggacgctggggtgcctggtgtcgggccttctggagacactggttacaaggctttctcgagcctgctcagcagcagtggcgtctgcacggacacagcagcagcagggactgacagtggatgtggagggtacaagcccttccagaaccctgttcctaaccagtcccccaactccatgcccttattcaccttcggactggacatggagctgccacccagtcccctgaactcagccccacccaatagcaccccagaatgccttggtctagagctggggctcaaaggaggcacctggctgaaggcccctcctccttcagagcaggtgcccaagccctttggggatgacctgggccttggcattgtgtactcgtccctcacctgccatctgtgtggccacctgaagcaacaccacagccaggaggaagatggtcagatccatgtcgttgctagccctggctgcggctgttgctatgatgaaaaatcaccatccttggggaatctctcggggaccttggagagctgtcctggggaaatgtcacaggaagccaacctcaccttagcacccaggacaccctccaatttgtcaggggtgggcaagggccctggccactctcctgttcccagccagactactgaggtacctgtgggcactctgggcgtcactgtgtcttaggtgagtgtgctgttgttgctgaggtctgtgctaaggccggggttcctccaagccagggaagtgcttcctgagagacagcccagctggcaggtttcccagaaatcgaaagaatggtgaagtgaagatgtgaacttggcctgaccctagaagttcagagcctggctgtctcccctaccgttggcctgggctctcctccctcacaagggattcagggactcattttgctttctcccacagcagtgctgatattcttaagccctgggctctcctagctcttgttgccctacctgctcaggcccattctgtccacccaatagaccgtttgcccaaggctcacagcagtcctggcatagctgtcgggttctcccagctggaagctggtcctagaaactcgcagctggcctggcagtggcttgggaggccctaactagtggaaattttgagttaagggagggtagatactgccccaaggaggctattcattgaacagctcggactgagactagaagcagagcctgctgtcccagcttggcccagttgtggaaagcaacaagaacgcaaacttgattgcccaaagtcactgccagttacccacatgtggccagaagccagggctcccaggatgtggaagtgggatcccagtaaacaaacacagcagcctagtggcaggtcccagtggacaccaccactggcagccaaggcgagaccacaagggaactgtggggctggttctggttggtggccagatgatagggatggcagatggcagactgcagtctgactgcattctggaggacgggaccaggctcaggactgtctgctcgtgtccctacctttgggacacctagtatgtttgcaaggagggcaggacagaagaggtcacgtggagctctatgtcaataaagactctttatcttgtcaaaaaaaaaaaaaaaaa

SEQ ID NO: 148 - DNA, 2451 bp, Rattus novergicus
dgtcgacccaatggggcggctttgcaccaagttcctgtcctccgtgagctgtctgattttgctatgggtgactggctctgggggcatcaaggtcctgggtgaccccacctgcttctctgactacatccgcacttctacgtgtgagtggcagctggatagcactgtggactgcagttctcagctcctcctggactacaggctgctcttcgagttctctgaaaacctcacatgcacccccaagaacagtgccgacaccgtgtgtgtgtgccaaatggccatagaggagccgatccaggcagacacatactggctggaactgtggtctgagcggggacagctgtggcaaggctccttcaagcctagtgacaatgtgaagcccccagctccagacaacctcacactccacaccaatgtctccaatggcctgctgctgatgtggagcaacccatacccatcgaacaacttcctgcacaaaggcctcatctgcatggtcaacatctccagagaggacaacccggcggaattcaaagtctataatgtgacctacacggaacccaagctgagcttcccagtcaacaccctaacatcaggggtgcgctatagggcacgtgtgagggtcttgtcccagagcttccctggcatctggagtgagtggagtcccagcatcacgtggtacaaccacttccagctgcccctgctgcagcgcctcccgctgggtgtcagcatctcctgcatctgcatcctattgttttgcctgacctgttacttcagcattatcaagattaagaagatatggtgggaccagattcccactccagcacgcagtcccttagcagccatcatcattcaggacacgaaggtgctcctctgggagaagcagacccgaagccaggagtcaaccaagagccggcactggaagacttgtctaaccaagctgctgccctgcttgctggagcatagagtgaagaaagagagagaatccccgaaggctgccaaaaccaagcctctccagagtcctgaaaaagcaggctggtatcctgcggaggtcagcaggaccgtcctctggccagagaacgttcatgtcagtgtggtgcgctgtatggagctgtttgaggccccagtacagaatgtggaggaggaagaggatgagatggtcaaaggggacctgagcatgtcacctgagaacagcggagggggcttccaggagagtcaggcagacatcatggcccggctcactgagaacctgttttcagacttgctgggggctgagaatggaggcgttggccagtcgagcatggcagagtcatcctcccttctgccttcagaaagtgggcaagcttctacgtcctgggcctgcttccccacggggcccagtgagaccacatgccaggtcacagggcagcagcctccacacccagaccctgagagagcaactggcacagcctgcacacaggtcccccttgtcatttcagacaatcctgcctaccggagttttagtgacttctccagccccgccccaaatcctggagagctggcttcagaacagaagcaggctggacatctggaagaaggggatcttctgagcccggttgacccccattcttcagggccaccaatgcagcaagcggagagctgggagcagatccttcacatgagtgtcctgcagcacgggacagctggctccaccccagcccctaccagtggctaccaagagtttgtgcaggcagtgaagcagggtgcgtcccaggccaggtgggtgcctggtgtcgggccttctggagacactggttacaaggctttctcgagcctgctcagcagcagtggcgtctgcacggacacagcagcagcagggactgacagtggatgtggagggtacaagcccttccagaaccctgttcctaaccagtcccccaactccatgcccttattcaccttcggactggacatggagctgccacccagtcccctgaactcagccccacccaatagcaccccagaatgccttggtctagagctggggctcaaaggaggcacctggctgaaggcccctcctccttcagagcaggtgcccaagccctttggggatgacctgggccttggcattgtgtactcgtccctcacctgccatctgtgtggccacctgaagcaacaccacagccaggaggaagatggtcagatccatgtcgttgcatgccctggctgcggctgttgctatgatgaaaaatcaccatccttggggaatctctcggggaccttggagagctgtcctggggaaatgtcacaggaagccaacctcaccttagcacccaggacaccctccaatttgtcaggggtgcaaggccctggccactctcctgttcccagccagactactgaggtacctgtgggcactctgggcgtcactgtgtcttaggtgagtgtgctgttgttgctgaggtctgtgctgtcgac

SEQ ID NO: 149 - protein, 826 aa, Homo sapiens
PMGWLCSGLLFPVSCLVLLQVASSGNMKVLQEPTCVSDYMSISTCEWKMNGPTNCSTELRLLYQLVFLLSEAHTCIPENNGGAGCVCHLLMDDVVSADNYTLDLWAGQQLLWKGSFKPSEHVKPRAPGNLTVHTNVSDTLLLTWSNPYPPDNYLYNHLTYAVNIWSENDPADFRIYNVTYLEPSLRIAASTLKSGISYRARVRAWAQCYNTTWSEWSPSTKWHNSYREPFEQHLLLGVSVSCIVILAVCLLCYVSITKIKKEWWDQIPNPARSRLVAIIIQDAQGSQWEKRSRGQEPAKCPHWKNCLTKLLPCFLEHNMKRDEDPHKAAKEMPFQGSGKSAWCPVEISKTVLWPESISVVRCVELFEAPVECEEEEEVEEEKGSFCASPESSRDDFQEGREGIVARLTESLFLDLLGEENGGFCQQDMGESCLLPPSGSTSAHMPWDEFPSAGPKEAPPWGKEQPLHLEPSPPASPTQSPDNLTCTETPLVIAGNPAYRSFSNSLSQSPCPRELGPDPLLARHLEEVEPEMPCVPQLSEPTTVPQPEPETWEQILRRNVLQHGAAAAPVSAPTSGYQEFVHAVEQGGTQASAVVGLGPPGEAGYKAFSSLLASSAVSPEKCGFGASSGEEGYKPFQDLIPGCPGDPAPVPVPLFTFGLDREPPRSPQSSHLPSSSPEHLGLEPGEKVEDMPKPPLPQEQATDPLVDSLGSGIVYSALTCHLCGHLKQCHGQEDGGQTPVMASPCCGCCCGDRSSPPTTPLRAPDPSPGGVPLEASLCPASLAPSGISEKSKSSSSFHPAPGNAQSSSQTPKIVNFVSVGPTYMRVS

SEQ ID NO: 150 - protein, 811 aa, Mus musculus
PMGRLCTKFLTSVGCLILLLVTGSGSIKVLGEPTCFSDYIRTSTCEWFLDSAVDCSSQLCLHYRLMFFEFSENLICIPRNSASTVCVCHMEMNRPVQSDRYQMELWAEHRQLWQGSFSPSGNVKPLAPDNLTLHTNVSDEWLLTWNNLYPSNNLLYKDLISMVNISREDNPAEFIVYNVTYKEPRLSFPINILMSGVYYTARVRVRSQILTGTWSEWSPSITWYNHFQLPLIQRLPLGVTISCLCIPLFCLFCYFSITKIKKIWWDQIPTPARSPLVAIIIQDAQVPLWDKQTRSQESTKYPHWKTCLDKLLPCLLKHRVKKKTDFPKAAPTKSPQSPGKAGWCPMEVSRTVLWPENVSVSVVRCMELFEAPVQNVEEEEDEIVKEDLSMSPENSGGCGFQESQADIMARLTENLFSDLLEAENGGLGQSALAESCSPLPSGSGQASVSWACLPMGPSEEATCQVTEQPSHPGPLSGSPAQSAPTLACTQVPLVLADNPAYRSFSDCCSPAPNPGELAPEQQQADHLEEEEPPSPADPHSSGPPMQPVESWEQILHMSVLQHGAAAGSTPAPAGGYQEFVQAVKQGAAQDPGVPGVRPSGDPGYKAFSSLLSSNGIRGDTAAAGTDDGHGGYKPFQNPVPNQSPSSVPLFTFGLDTELSPSPLNSDPPKSPPECLGLELGLKGGDWVKAPPPADQVPKPFGDDLGFGIVYSSLTCHLCGHLKQHHSQEEGGQSPIVASPGCGCCYDDRSPSLGSLSGALESCPEGIPPEANLMSAPKTPSNLSGEGKGPGHSPVPSQTTEVPVGALGIAVS

SEQ ID NO: 151 - protein, 801 aa, Rattus novergicus
PMGRLCTKFLSSVSCLILLWVTGSGGIKVLGDPTCFSDYIRTSTCEWQLDSTVDCSSQLLLDYRLLFEFSENLTCTPKNSADTVCVCQMAIEEPIQADTYWLELWSERGQLWQGSFKPSDNVKPPAPDNLTLHTNVSNGLLLMWSNPYPSNNFLHKGLICMVNISREDNPAEFKVYNVTYTEPKLSFPVNTLTSGVRYRARVRVLSQSFPGIWSEWSPSITWYNHFQLPLLQRLPLGVSISCICILLFCLTCYFSIIKIKKIWWDQIPTPARSPLAAIIIQDTKVLLWEKQTRSQESTKSRHWKTCLTKLLPCLLEHRVKKERESPKAAKTKPLQSPEKAGWYPAEVSRTVLWPENVHVSVVRCMELFEAPVQNVEEEEDEMVKGDLSMSPENSGGGFQESQADIMARLTENLFSDLLGAENGGVGQSSMAESSSLLPSESGQASTSWACFPTGPSETTCQVTGQQPPHPDPERATGTACTQVPLVISDNPAYRSFSDFSSPAPNPGELASEQKQAGHLEEGDLLSPVDPHSSGPPMQQAESWEQILHMSVLQHGTAGSTPAPTSGYQEFVQAVKQGASQARWVPGVGPSGDTGYKAFSSLLSSSGVCTDTAAAGTDSGCGGYKPFQNPVPNQSPNSMPLFTFGLDMELPPSPLNSAPPNSTPECLGLELGLKGGTWLKAPPPSEQVPKPFGDDLGLGIVYSSLTCHLCGHLKQHHSQEEDGQIHVVACPGCGCCYDEKSPSLGNLSGTLESCPGEMSQEANLTLAPRTPSNLSGVQGPGHSPVPSQTTEVPVGTLGVTVS

SEQ ID NO: 152 - DNA, 1561 bp, Homo sapiens
dagaggaaacgtgtgggtggggaggggtagtgggtgagggacccaggttcctgacacagacagactacacccagggaatgaagagcaagcgccatgttgaagccatcattaccattcacatccctcttattcctgcagctgcccctgctgggagtggggctgaacacgacaattctgacgcccaatgggaatgaagacaccacagctgatttcttcctgaccactatgcccactgactccctcagtgtttccactctgcccctcccagaggttcagtgttttgtgttcaatgtcgagtacatgaattgcacttggaacagcagctctgagccccagcctaccaacctcactctgcattattggtacaagaactcggataatgataaagtccagaagtgcagccactatctattctctgaagaaatcacttctggctgtcagttgcaaaaaaaggagatccacctctaccaaacatttgttgttcagctccaggacccacgggaacccaggagacaggccacacagatgctaaaactgcagaatctggtgatcccctgggctccagagaacctaacacttcacaaactgagtgaatcccagctagaactgaactggaacaacagattcttgaaccactgtttggagcacttggtgcagtaccggactgactgggaccacagctggactgaacaatcagtggattatagacataagttctccttgcctagtgtggatgggcagaaacgctacacgtttcgtgttcggagccgctttaacccactctgtggaagtgctcagcattggagtgaatggagccacccaatccactgggggagcaatacttcaaaagagaatcctttcctgtttgcattggaagccgtggttatctctgttggctccatgggattgattatcagccttctctgtgtgtatttctggctggaacggacgatgccccgaattcccaccctgaagaacctagaggatcttgttactgaataccacgggaacttttcggcctggagtggtgtgtctaagggactggctgagagtctgcagccagactacagtgaacgactctgcctcgtcagtgagattcccccaaaaggaggggcccttggggaggggcctggggcctccccatgcaaccagcatagcccctactgggcccccccatgttacaccctaaagcctgaaacctgaaccccaatcctctgacagaagaaccccagggtcctgtagccctaagtggtactaactttccttcattcaacccacctgcgtctcatactcacctcaccccactgtggctgatttggaattttgtgcccccatgtaagcaccccttcatttggcattccccacttgagaattacccttttgccccgaacatgtttttcttctccctcagtctggcccttccttttcgcaggattcttcctccctccctctttccctcccttcctctttccatctaccctccgattgttcctgaaccgatgagaaataaagtttctgttgataatcatcaaaaaaaaaaaaaaaaaaaaaaaaaaaaaaa

SEQ ID NO: 153 - DNA, 1613 bp, Mus musculus
dgacacagactacacccagagaaagaagagcaagcaccatgttgaaactattattgtcacctagatccttcttagtccttcagctgctcctgctgagggcagggtggagctccaaggtcctcatgtccagtgcgaatgaagacatcaaagctgatttgatcctgacttctacagcccctgaacacctcagtgctcctactctgccccttccagaggttcagtgctttgtgttcaacatagagtacatgaattgcacttggaatagcagttctgagcctcaggcaaccaacctcacgctgcactataggtacaaggtatctgataataatacattccaggagtgcagtcactatttgttctccaaagagattacttctggctgtcagatacaaaaagaagatatccagctctaccagacatttgttgtccagctccaggacccccagaaaccccagaggcgagctgtacagaagctaaacctacagaatcttgtgatcccacgggctccagaaaatctaacactcagcaatctgagtgaatcccagctagagctgagatggaaaagcagacatattaaagaacgctgtttacaatacttggtgcagtaccggagcaacagagatcgaagctggacggaactaatagtgaatcatgaacctagattctccctgcctagtgtggatgagctgaaacggtacacatttcgggttcggagccgctataacccaatctgtggaagttctcaacagtggagtaaatggagccagcctgtccactgggggagtcatactgtagaggagaatccttccttgtttgcactggaagctgtgcttatccctgttggcaccatggggttgattattaccctgatctttgtgtactgttggttggaacgaatgcctccaattccccccatcaagaatctagaggatctggttactgaataccaagggaacttttcggcctggagtggtgtgtctaaagggctgactgagagtctgcagccagactacagtgaacggttctgccacgtcagcgagattccccccaaaggaggggccctaggagaggggcctggaggttctccttgcagcctgcatagcccttactggcctcccccatgttattctctgaagccggaagcctgaacatcaatcctttgatggaacctcaaagtcctatagtcctaagtgacgctaacctcccctactcaccttggcaatctggatccaatgctcactgccttcccttggggctaagtttcgatttcctgtcccatgtaactgcttttctgttccatatgccctacttgagagtgtcccttgccctctttccctgcacaagccctcccatgcccagcctaacacctttccactttctttgaagagagtcttaccctgtagcccagggtggctgggagctcactatgtaggccaggttggcctccaactcacaggctatcctcccacctctgcctcataagagttggggttactggcatgcaccaccacacccagcatggtccttctcttttataggattctccctccctttttctacctatgattcaactgtttccaaatcaacaagaaataaagtttttaaccaatgat

SEQ ID NO: 154 - DNA, 1612 bp, Rattus novergicus
dgaagagcaagcgccatgttgaaaccattattgccatctagatccttcttactccttcagctgcttctgctgagggtagggtggagctccaaggtcctcatgtccagtgggaatgaagacaccaaatctgatctcttgctgacttctatggaccttaaacatctcagtgttcctactctgcccctcccagaggttcaatgctttgtgttcaatgtcgagtatatgaattgcacttggaatagcagttctgagcctcagccgaccaacctcactatgcactataggtacaagggatctgataataatacattccaggagtgcagccactatctgttctcaaaagagattacttctggctgtcagatacaaaaagaagatatccagctctaccagacatttgttgtccagcttcaggacccccagaaaccccagaggcgagccgaacagaagctaaacctacagaatcttgtgatcccatgggctccagagaatctaacactttataacctgagtgaatctcaggtagaactgaggtggaaaagcagatacatagaacgctgtttacaatacttggtgcagtaccggagcaaccgagatcgaagctggacggaacaaatagtggatcatgagcctagattctccctgcctagtgtggatgaacagaagctgtacacatttcgggttcggagccgctttaacccgatctgtggaagtactcaacagtggagtaaatggagccaaccaatccactgggggagccatactgcagaggagaatccttccttgtttgcactggaagctgtgcttatccctgttggcaccatggggttgattattaccctgatctttgtgtactgttggttggaacgaatgcctcgaattcccgccatcaagaatctagaggatctggttactgaataccatgggaacttttcggcctggagtggtgtgtctaaagggctgactgagagtctgcagccagactacagtgaacggttctgccacgtcagtgagattcccccgaaaggaggagccctaggagaggggcctggaggctctccttgcagccttcatagcccttactggcctcccccatgttattctctgaagcctgaagcctgagcctccaatcccttgatggaacctcaaagtcctatagccctaagtgatgctaacctccccctacacattttgccaacctggatccaatgcttattgcctcccgctatggctaattttcaatttcatgtcccatgtaactgcttttccattccatacgccctacttgagaatgccccttgccccctttccctgcacaagccctcccgtgcctagtctagtactttttcactttttttttgagagagtcttaccctgtagtccggggtggctgggaacttactacgtaggccagattggcctataactcagaggcgatcatcccacttcttcttctcaagtgtcggcgttcttggcaagcaccaccacatccagcacggccctcttcttttacaggattctccctccctttttctacctaccattcaactgttgccaaatcaataagaaataaagtttttaaccaataaaaaaaaaaaaaaaaaaaaaaaaa

SEQ ID NO: 155 - protein, 370 aa, Homo sapiens
PMLKPSLPFTSLLFLQLPLLGVGLNTTILTPNGNEDTTADFFLTTMPTDSLSVSTLPLPEVQCFVFNVEYMNCTWNSSSEPQPTNLTLHYWYKNSDNDKVQKCSHYLFSEEITSGCQLQKKEIHLYQTFVVQLQDPREPRRQATQMLKLQNLVIPWAPENLTLHKLSESQLELNWNNRFLNHCLEHLVQYRTDWDHSWTEQSVDYRHKFSLPSVDGQKRYTFRVRSRFNPLCGSAQHWSEWSHPIHWGSNTSKENPFLFALEAVVISVGSMGLIISLLCVYFWLERTMPRIPTLKNLEDLVTEYHGNFSAWSGVSKGLAESLQPDYSERLCLVSEIPPKGGALGEGPGASPCNQHSPYWAPPCYTLKPET

SEQ ID NO: 156 - protein, 264 aa, Mus musculus
PMLKLLLSPRSFLVLQLLLLRAGWSSKVLMSSANEDIKADLILTSTAPEHLSAPTLPLPEVQCFVFNIEYMNCTWNSSSEPQATNLTLHYRYKVSDNNTFQECSHYLFSKEITSGCQIQKEDIQLYQTFVVQLQDPQKPQRRAVQKLNLQNLVIPRAPENLTLSNLSESQLELRWKSRHIKERCLQYLVQYRSNRDRSWTELIVNHEPRFSLPSVDELKRYTFRVRSRYNPICGSSQQWSKWSQPVHWGSHTVEECLQFPPSRI

SEQ ID NO: 157 - protein, 370 aa, Mus musculus
PMLKLLLSPRSFLVLQLLLLRAGWSSKVLMSSANEDIKADLILTSTAPEHLSAPTLPLPEVQCFVFNIEYMNCTWNSSSEPQATNLTLHYRYKVSDNNTFQECSHYLFSKEITSGCQIQKEDIQLYQTFVVQLQDPQKPQRRAVQKLNLQNLVIPRAPENLTLSNLSESQLELRWKSRHIKERCLQYLVQYRSNRDRSWTELIVNHEPRFSLPSVDELKRYTFRVRSRYNPICGSSQQWSKWSQPVHWGSHTVEENPSLFALEAVLIPVGTMGLIITLIFVYCWLERMPPIPPIKNLEDLVTEYQGNFSAWSGVSKGLTESLQPDYSERFCHVSEIPPKGGALGEGPGGSPCSLHSPYWPPPCYSLKPEA

SEQ ID NO: 158 - protein, 369 aa, Rattus novergicus
PMLKPLLPSRSFLLLQLLLLRVGWSSKVLMSSGNEDTKSDLLLTSMDLKHLSVPTLPLPEVQCFVFNVEYMNCTWNSSSEPQPTNLTMHYRYKGSDNNTFQECSHYLFSKEITSGCQIQKEDIQLYQTFVVQLQDPQKPQRRAEQKLNLQNLVIPWAPENLTLYNLSESQVELRWKSRYIERCLQYLVQYRSNRDRSWTEQIVDHEPRFSLPSVDEQKLYTFRVRSRFNPICGSTQQWSKWSQPIHWGSHTAEENPSLFALEAVLIPVGTMGLIITLIFVYCWLERMPRIPAIKNLEDLVTEYHGNFSAWSGVSKGLTESLQPDYSERFCHVSEIPPKGGALGEGPGGSPCSLHSPYWPPPCYSLKPEA

SEQ ID NO: 159 - DNA, 864 bp, Homo sapiens
dcaaggttcagagtcacccatctcagcaagcccagaagtatctgcaatatctacgatggcctcgccctttgctttactgatggtcctggtggtgctcagctgcaagtcaagctgctctctgggctgtgatctccctgagacccacagcctggataacaggaggaccttgatgctcctggcacaaatgagcagaatctctccttcctcctgtctgatggacagacatgactttggatttccccaggaggagtttgatggcaaccagttccagaaggctccagccatctctgtcctccatgagctgatccagcagatcttcaacctctttaccacaaaagattcatctgctgcttgggatgaggacctcctagacaaattctgcaccgaactctaccagcagctgaatgacttggaagcctgtgtgatgcaggaggagagggtgggagaaactcccctgatgaatgcggactccatcttggctgtgaagaaatacttccgaagaatcactctctatctgacagagaagaaatacagcccttgtgcctgggaggttgtcagagcagaaatcatgagatccctctctttatcaacaaacttgcaagaaagattaaggaggaaggaataacatctggtccaacatgaaaacaattcttattgactcatacaccaggtcacgctttcatgaattctgtcatttcaaagactctcacccctgctataactatgaccatgctgataaactgatttatctatttaaatatttatttaactattcataagatttaaattatttttgttcatataacgtcatgtgcacctttacactgtggttagtgtaataaaacatgttccttatatttactc

SEQ ID NO: 160 - DNA, 571 bp, Mus musculus
datggctaggctctgtgctttcctgatggtcctggcggtgctgagctactggccaacctgctctctaggatgtgaccttcctcagactcataacctcaggaacaagagagccttgacactcctggtacaaatgaggagactctcccctctctcctgcctgaaggacaggaaggactttggattcccgcaggagaaggtggatgcccagcagatcaagaaggctcaagccatccctgtcctgagtgagctgacccagcagatcctgaacatcttcacatcaaaggactcatctgctgcatggaatacaaccctcctagactcattctgcaatgacctccaccagcagctcaatgacctgcaaggctgtctgatgcagcaggtgggggtgcaggaatttcccctgacccaggaagatgccctgctggctgtgaggaaatacttccacaggatcactgtgtacctgagagagaagaaacacagcccctgtgcctgggaggtggtcagagcagaagtctggagagccctgtcttcctctgccaatgtgctgggaagactgagagaagagaaatga

SEQ ID NO: 161 - DNA, 580 bp, Rattus novergicus
datggctcggctctgtgctttcttgatgtccctggtggtggtgagctactggtcagcctgctgtctaggatgtgacctgcctcatactcataacctcaggaacaagagagtcttcacactcctggcacaaatgaggagactctcccctgtctcatgcctgaaggacagaaagtactttgggttccctttggagaaggtggatggccagcagatccagaaggctcaagctatccctgtcctgcatgagctgacccagcagatcctcagcctcttcacatcaaaggagtcatctactgcttgggatgcaaccctcctagactcattctgtaatgacctccagcagcagctgagtggtctgcaagcctgtctgatgcagcaggtaggggtgcaggaatctcccctgacccaggaagactccctactggctgtgagggaatacttccacagaatcactgtgtacctgagagagaataaacacagcccctgtgcctgggaggtggtcaaagcagaagtctggagagccctgtcttcctcagccaacttgatgggaagactgagagaagaaagaaatgagtcctga

SEQ ID NO: 162 - protein, 190 aa, Homo sapiens
PMASPFALLMVLVVLSCKSSCSLGCDLPETHSLDNRRTLMLLAQMSRISPSSCLMDRHDFGFPQEEFDGNQFQKAPAISVLHELIQQIFNLFTTKDSSAAWDEDLLDKFCTELYQQLNDLEACVMQEERVGETPLMNADSILAVKKYFRRITLYLTEKKYSPCAWEVVRAEIMRSLSLSTNLQERLRRKE

SEQ ID NO: 163 - protein, 190 aa, Mus musculus
PMARLCAFLMVLAVLSYWPTCSLGCDLPQTHNLRNKRALTLLVQMRRLSPLSCLKDRKDFGFPQEKVDAQQIKKAQAIPVLSELTQQILNIFTSKDSSAAWNTTLLDSFCNDLHQQLNDLQGCLMQQVGVQEFPLTQEDALLAVRKYFHRITVYLREKKHSPCAWEVVRAEVWRALSSSANVLGRLREEK

SEQ ID NO: 164 - protein, 193 aa, Rattus novergicus
PMARLCAFLMSLVVVSYWSACCLGCDLPHTHNLRNKRVFTLLAQMRRLSPVSCLKDRKYFGFPLEKVDGQQIQKAQAIPVLHELTQQILSLFTSKESSTAWDATLLDSFCNDLQQQLSGLQACLMQQVGVQESPLTQEDSLLAVREYFHRITVYLRENKHSPCAWEVVKAEVWRALSSSANLMGRLREERNES

SEQ ID NO: 165 - DNA, 841 bp, homo sapiens
dacattctaactgcaacctttcgaagcctttgctctggcacaacaggtagtaggcgacactgttcgtgttgtcaacatgaccaacaagtgtctcctccaaattgctctcctgttgtgcttctccactacagctctttccatgagctacaacttgcttggattcctacaaagaagcagcaattttcagtgtcagaagctcctgtggcaattgaatgggaggcttgaatactgcctcaaggacaggatgaactttgacatccctgaggagattaagcagctgcagcagttccagaaggaggacgccgcattgaccatctatgagatgctccagaacatctttgctattttcagacaagattcatctagcactggctggaatgagactattgttgagaacctcctggctaatgtctatcatcagataaaccatctgaagacagtcctggaagaaaaactggagaaagaagatttcaccaggggaaaactcatgagcagtctgcacctgaaaagatattatgggaggattctgcattacctgaaggccaaggagtacagtcactgtgcctggaccatagtcagagtggaaatcctaaggaacttttacttcattaacagacttacaggttacctccgaaactgaagatctcctagcctgtgcctctgggactggacaattgcttcaagcattcttcaaccagcagatgctgtttaagtgactgatggctaatgtactgcatatgaaaggacactagaagattttgaaatttttattaaattatgagttatttttatttatttaaattttattttggaaaataaattatttttggtgcaaaagtca

SEQ ID NO: 166 - DNA, 771 bp, Mus musculus
dacaccagcctggcttccatcatgaacaacaggtggatcctccacgctgcgttcctgctgtgcttctccaccacagccctctccatcaactataagcagctccagctccaagaaaggacgaacattcggaaatgtcaggagctcctggagcagctgaatggaaagatcaacctcacctacagggcggacttcaagatccctatggagatgacggagaagatgcagaagagttacactgcctttgccatccaagagatgctccagaatgtctttcttgtcttcagaaacaatttctccagcactgggtggaatgagactattgttgtacgtctcctggatgaactccaccagcagacagtgtttctgaagacagtactagaggaaaagcaagaggaaagattgacgtgggagatgtcctcaactgctctccacttgaagagctattactggagggtgcaaaggtaccttaaactcatgaagtacaacagctacgcctggatggtggtccgagcagagatcttcaggaactttctcatcattcgaagacttaccagaaacttccaaaactgaagacctgtcagttgatgcctcagaatgagtggtggttgcaggcaacctttaagcatcagaggcggactctgggactggtagtgaatctactgcatttgaaaggtcaaaggaaaacagagtttttattaatttataatttaaattattttctactttttatttaaactttttaacctcagaaaataaaatatttataataca

SEQ ID NO: 167 - DNA, 556 bp, Rattus novergicus
datggccaacaggtggaccctccacattgcgttcctgctgtgcttctccaccactgccctctccatcgactacaagcagctccagttccgacaaagcactagcattcggacatgtcagaagctcctgaggcagctgaatggaaggctcaacctcagctacaggacggacttcaagatccctatggaggtgatgcacccgtcacagatggagaagagttacactgcctttgccattcaagtgatgctccagaatgtctttcttgtcttcagaagcaatttctccagcactgggtggaatgagactattgttgaaagtctcttggatgaactacatcagcagacagagcttctggagataatactaaaggaaaagcaagaggaaagattgacttgggtgacatccacgactactttaggcttgaagagctattactggagggtacaaaggtaccttaaagacaagaagtacaacagctatgcctggatggtggtccgagcagaagtcttcaggaacttttccattattctaagacttaatagaaacttccagaactga

SEQ ID NO: 168 - protein, 188 aa, Homo sapiens
PMTNKCLLQIALLLCFSTTALSMSYNLLGFLQRSSNFQCQKLLWQLNGRLEYCLKDRMNFDIPEEIKQLQQFQKEDAALTIYEMLQNIFAIFRQDSSSTGWNETIVENLLANVYHQINHLKTVLEEKLEKEDFTRGKLMSSLHLKRYYGRILHYLKAKEYSHCAWTIVRVEILRNFYFINRLTGYLRN

SEQ ID NO: 169 - protein, 183 aa, Mus musculus
PMNNRWILHAAFLLCFSTTALSINYKQLQLQERTNIRKCQELLEQLNGKINLTYRADFKIPMEMTEKMQKSYTAFAIQEMLQNVFLVFRNNFSSTGWNETIVVRLLDELHQQTVFLKTVLEEKQEERLTWEMSSTALHLKSYYWRVQRYLKLMKYNSYAWMVVRAEIFRNFLIIRRLTRNFQN

SEQ ID NO: 170 - protein, 185 aa, Rattus novergicus
PMANRWTLHIAFLLCFSTTALSIDYKQLQFRQSTSIRTCQKLLRQLNGRLNLSYRTDFKIPMEVMHPSQMEKSYTAFAIQVMLQNVFLVFRSNFSSTGWNETIVESLLDELHQQTELLEIILKEKQEERLTWVTSTTTLGLKSYYWRVQRYLKDKKYNSYAWMVVRAEVFRNFSIILRLNRNFQN

SEQ ID NO: 171 - DNA, 6100 bp, Homo sapiens
daggcggcgcgtgcgtagaggggcggtgagagctaagaggggcagcgcgtgtgcagaggggcggtgtgacttaggacggggcgatggcggctgagaggagctgcgcgtgcgcgaacatgtaactggtgggatctgcggcggctcccagatgatggtcgtcctcctgggcgcgacgaccctagtgctcgtcgccgtggcgccatgggtgttgtccgcagccgcaggtggaaaaaatctaaaatctcctcaaaaagtagaggtcgacatcatagatgacaactttatcctgaggtggaacaggagcgatgagtctgtcgggaatgtgactttttcattcgattatcaaaaaactgggatggataattggataaaattgtctgggtgtcagaatattactagtaccaaatgcaacttttcttcactcaagctgaatgtttatgaagaaattaaattgcgtataagagcagaaaaagaaaacacttcttcatggtatgaggttgactcatttacaccatttcgcaaagctcagattggtcctccagaagtacatttagaagctgaagataaggcaatagtgatacacatctctcctggaacaaaagatagtgttatgtgggctttggatggtttaagctttacatatagcttagttatctggaaaaactcttcaggtgtagaagaaaggattgaaaatatttattccagacataaaatttataaactctcaccagagactacttattgtctaaaagttaaagcagcactacttacgtcatggaaaattggtgtctatagtccagtacattgtataaagaccacagttgaaaatgaactacctccaccagaaaatatagaagtcagtgtccaaaatcagaactatgttcttaaatgggattatacatatgcaaacatgacctttcaagttcagtggctccacgcctttttaaaaaggaatcctggaaaccatttgtataaatggaaacaaatacctgactgtgaaaatgtcaaaactacccagtgtgtctttcctcaaaacgttttccaaaaaggaatttaccttctccgcgtacaagcatctgatggaaataacacatctttttggtctgaagagataaagtttgatactgaaatacaagctttcctacttcctccagtctttaacattagatcccttagtgattcattccatatctatatcggtgctccaaaacagtctggaaacacgcctgtgatccaggattatccactgatttatgaaattattttttgggaaaacacttcaaatgctgagagaaaaattatcgagaaaaaaactgatgttacagttcctaatttgaaaccactgactgtatattgtgtgaaagccagagcacacaccatggatgaaaagctgaataaaagcagtgtttttagtgacgctgtatgtgagaaaacaaaaccaggaaatacctctaaaatttggcttatagttggaatttgtattgcattatttgctctcccgtttgtcatttatgctgcgaaagtcttcttgagatgcatcaattatgtcttctttccatcacttaaaccttcttccagtatagatgagtatttctctgaacagccattgaagaatcttctgctttcaacttctgaggaacaaatcgaaaaatgtttcataattgaaaatataagcacaattgctacagtagaagaaactaatcaaactgatgaagatcataaaaaatacagttcccaaactagccaagattcaggaaattattctaatgaagatgaaagcgaaagtaaaacaagtgaagaactacagcaggactttgtatgaccagaaatgaactgtgtcaagtataaggtttttcagcaggagttacactgggagcctgaggtcctcaccttcctctcagtaactacagagaggacgtttccctgtttagggaaagaaaaaacatcttcagatcataggtcctaaaaatacgggcaagctcttaactatttaaaaatgaaattacaggcccgggcacggtggctcacacctgtaatcccagcactttgggaggctgaggcaggcagatcatgaggtcaagagatcgagaccagcctggccaacgtggtgaaaccccatctctactaaaaatacaaaaattagccgggtgtggtggcgcgcgcctgttgtcttagctactcaggaggctgaggcaggagaatcgcttgaaaacaggaggtggaggttgcagtgagccgagatcacgccactgcactccagcctggtgacagcgtgagactctttaaaaaaagaaattaaaagagttgagacaaacgtttcctacattcttttccatgtgtaaaatcatgaaaaagcctgtcaccggacttgcattggatgagatgagtcagaccaaaacagtggccacccgtcttcctcctgtgagcctaagtgcagccgtgctagctgcgcaccgtggctaaggatgacgtctgtgttcctgtccatcactgatgctgctggctactgcatgtgccacacctgtctgttcgccattcctaacattctgtttcattcttcctcgggagatatttcaaacatttggtcttttcttttaacactgagggtaggcccttaggaaatttatttaggaaagtctgaacacgttatcacttggttttctggaaagtagcttaccctagaaaacagctgcaaatgccagaaagatgatccctaaaaatgttgagggacttctgttcattcatcccgagaacattggcttccacatcacagtatctacccttacatggtttaggattaaagccaggcaatcttttactatgcattaagacctctgattcaaaacttattagaacagtagcttctgctggaatttgcaatcactgaagtcatagaaaataggtaactatctaattagagaaataattgttgtattttaagatctgagagtgtgtacaagttttagtatacatgccatgccagaagatagtgtatgcaagaagtcttgggaccagaaaatggcaatgataggagactgacatagaagaagaatgcttccctaggaaaaaggtcgctggctttggtgcaagaggaagaagaatgttccactggaagcctgagcacctaatcagctctcagtgatcaacccactcttgttatgggtggtctctgtcactttgaatgccaggctggcttctcgtctagcagtattcagataccccttctgctcagcctgcttggcgttaaaatacaaatcattgaactgagggggaaaaatgtaactaggaagaaaaacccaatttaagaaattacataatgctttccaaaggcacctacaacttagttttaaattacttgctactggggattacccatggatatccttaataggcaggaagtctgggaattctggtggcctctagggcagtgttctcacagcaccgttccgacagggaccagtgaaagaaaagagacaaagttagaacgtgctggggagcggccatttctaaggccagtctggtttaagtagtcatttctgctgaaaaaacagatgatcctggtggaagaaaaggttgaaggcagctgccctcgggagggctgtgatgctcggcacatcctgcctggcacatacacgtgtctgcaggccacaccgtgcatgtccccagacctgccgcctggcttctggagtgcttcaagcagagcatggtgggtcattgaggagacccaggaatctcatctgagaacccactctctgccggagaaccccatggtgacacattttcatctttctgaccagaggctgtttttttttttttttgagacagtctcattctgttgcccaggctggagtgcagtggcttgatctcggctcactgcaacctcgcctcccgggttcaagcaattctctgccgcagcctccagagtagctgggataacaggtgcccaccaccacaccccactaatttttgtatttgtatttttagtagagatggggtttcaccatgttggtcaggctggtcttggactcctgacctcatgctccacccgcttcggcctcccaaagttctgggattacaggtgtgagccaccgtgcacggccggcctgacctttggaaaagccttgtcactttggacgtttgcgtctttgaagaggcgatgggagcatatcatgactgcctgccaccattgcttttcagactaccacaactcaatcatgctgtccaggacttctggccctgtgttcaccactgggaaaacgtacttcagactggatagcctaaaaaggagcaatgcccttgtaggatgtggagaagggaaaatacggacattaacattaaaagacaccagtgaaattgttaggtctctaggaagttggagcacaaggcttcacgctttaagaccatctgtggttttcagtgaacaagcgctgagcaccagcagcagaaaacaacaacaaaaaaacacctcgtttttaccttgtcttctagacatgaaaaggcagttgcattccactctgcattatgttctacatgttgctttatcagtatatgcttagctgtaagtgacaagtattttttctgaacagaagtttacttagaaataccatgcacttgggggtaccaattaaccgcctgaaaattagcatattgatagttcttagagagaccagatataatctaagaatttatatgaaagatttgtatcattagagccagaaataattttatattaatatataatacagattaacattatatataatatgtacctgtgtcacttctgacatgagcctgtaaacatatattcatatatgtacctgcacatgtacccacctgatgtaggtcttattcctttagtatggacttaaagtacttattcatataccttgtaactaaaaattagaacagctccctagaattgtgaacttttaagagtctgactagaaatttgcaacttataaaaaagttacttttaaaaatataagttagggctaggcacagtggctcatgcctataatctcagcacttttgggaggccaagacaggaggatcacttcaggccaggagttcaagatcaaccaacctgggtaacatggccagaccccatctctatttatatatatatatataaaacttagagtttttatcttcccctaaaagaggccgtgatatttgcagcagcctcaaattgctcttaaggggtttaggtgtgcagaagctttcctttccctacccagtaaccatgtgactactaacgtggtatattgatttattttgtttgctgtctgtctcccctgccccactgctggaacagaggctccaagaaaacagggaccttattattcattactgcatccccagtaatgaaagtacttagaaaataattattgaatgaatgaaatctaaactgtgaacctgagggtgtttgtggcagtgtttgttttactgaattgtagaaggacataaccgtgttttcagtgtttctatggaacaaacttgtacattttatttcacttgtgttttgtcttaaaccctactgctggaaacaattttatgtaataagcaatgggcccaaaagtctaggagtttttttgtacttagtgaatttgtatgcaacagagatgctgcagctgatgcctttaaaaggtattcatcatggaagagctgaggcctgtgcttggtgttccagagcccagggttgagcatcctgaaggagccactgcagccgtcactgtccccagagcctgtggagatagagcctgtttgctgctttttcttcccgctcttaagacatggctggagctcagtcttcattgaatgaagtttgctgtggtattgcatagccttgctttcttgaactaaactgtttgcccttcacaagtagttcttctttcaggattagttcgttccaaggaggctcttcagtctcacagataagtagatctctcctgctgtctggacacatttcactcggaaattgaatacaatttgtattcaggctgggaacctgaacacacacttgtgtttttaagcttcccttttttacagtggacaaggacacaaataataaataaatcatccctaatgcccaagaaaaaaa

SEQ ID NO: 172 - DNA, 7026 bp, Mus musculus
dggaaggggcggggcgctggagggggcggggcgtcgcggagggcctagctgcccagaggtagtctccagctccgcggtgctgctgaggagaaggaggagaatgtgagccgccgcccggcctcccaagacgatgctcgctgtcgtgggcgcggcggccctggtgctggtggccggggcgccttgggtgctaccctcagctgcaggtggagaaaatctgaaacctcctgagaatatagacgtctacattatagatgacaactacaccctaaagtggagcagccacggagagtcaatgggcagtgtgaccttttcagcagaatatcgaacaaaagacgaggcgaagtggttaaaagtgcctgaatgtcaacatactacaacgaccaagtgtgaattctctttactggacacaaatgtgtatatcaaaacacagtttcgtgtcagagcagaggaagggaacagcacatcttcgtggaatgaggttgatccgtttattccattctacacagctcacatgagccccccagaagtacgtttagaagctgaagataaagccatactagtccacatctctcctcccggacaagacgggaacatgtgggcactggagaaaccttccttcagttacaccatacgaatctggcagaagtcttccagtgacaaaaaaactattaactctacgtattatgtagaaaagataccagaactcttgccagagactacttactgtttagaagttaaagcaatacatccgtcacttaagaaacacagcaattacagcactgtgcagtgtataagcaccacagtggcaaataaaatgcctgtgccaggaaatctccaagtggatgcccaaggcaagagctatgtcctgaaatgggactacattgcgtctgcagacgtgctcttcagggcacagtggcttcctggctattcaaaaagcagttctggaagccgttcagataaatggaaaccaataccaacctgtgcaaatgtccagactacgcactgtgtcttttctcaagatactgtctacacaggaacgttctttctccatgtacaagcctcagagggaaatcacacatccttttggtctgaagagaagtttattgattctcaaaaacacattctccctcctcctccggtcattactgtcaccgccatgagtgacaccttgcttgtttatgtcaactgtcaggacagcacatgtgatggactcaattacgaaatcatcttttgggaaaacacttccaatactaagataagcatggagaaggatggcccagagttcaccctcaagaacctgcagccgctgactgtgtactgtgtccaggccagagtgctcttcagggccctgctgaataagaccagcaacttcagtgaaaagctgtgtgagaaaacacgtccaggaagtttttccacgatctggattataactggattaggtgttgtgttcttctctgtcatggtcctttatgctttgaggagcgtctggaaatacctgtgtcatgtgtgcttcccaccactcaagcctccccgcagtattgatgagtttttctctgagccgccttcaaaaaaccttgtacttctgacggctgaggagcacacggaaagatgcttcatcattgagaatacagacacggtcgctgtagaagtaaagcacgcgcctgaggaggacctcaggaagtacagctcacagaccagccaggactcgggcaactattccaacgaagaggaggagagtgtgggcaccgagagcggccaagctgtgctctccaaagctccctgcggggggccatgcagcgtgcctagccctcctgggaccttggaagacgggacctgcttcctgggaaatgaaaaatatcttcagagcccagccctgaggacagagccagctcttctctgctgacaggtgctcggcccaggctgggggccgtgtggaggagacagacttatctgaagtggctgccagcttctgctgccagctggaagccctgggtgctgtttgtgccacagatgaggctcactgatgtcaggcatctggtggttctgtctcggtgtttgtcctctaggtgacatttagaacattccgatttttaatcctgccgtagcccctcagtgtgtcacaggtaccattgtctacagccgcgcttcctaacccatacctcaccacagccgtggcttctgaccagaagtcactgaaaccatggagaaaggggacactaactggaggagctggcgttgtttaagatctcagtgtggcctgggtgtgcccgttgtactctagtacttgcagaactagaaaatgccagggacaaaaagcaggcatgaaccattcagtaagagagaagctagtgaacctgatggtgaaagaagaccgtgtccagtcagtgtttgtgtgaaggccctgtgctgctctctgtagccttcccgtggtacttataaaaccaggccgaaccctgtcctctgtccggcactattcaggtcccttcccagctccaggtacttaaaaaacaaagtgttgggtcctggggtgagggaacagcttcgacggcacagtgctgcctgcaggcgcctataagtgaccttagatgaatgctccatgagcatcttcggtaggcaggacatccagcagtgctggtggctccagggcagactcagttgcaggccaaaaaggaagagagaggagtcatagccctgccccaatcgagcttgttgctcgctgcactgcgcctttgtaatcaatcttggtttttttgttttgttttgttttttttaacttttaggtgataacatattctcagatatagcacacaagagacactacacaaattacgtctgaaagttttgatagaaaagagcttttgactggggtagacagcttgctcctcactactaccttgtatctcagtctcctcaacagagagagaatgcagattgattttcatcctgagttttattttcttgcccggtttctgggttcgggtgtgctttcaaggctctgaacagcttgtctgcccacaggggagcccggagacccagccttttggctaaatgttgcaggttcctgtacttgaaggactccagctcctctgtagagggcatggtcatcgcggtctgcaatcacgctgatacccagaaaaatggccacacaactcaaatctggtgccacgctttaataattctacccagcacggcccagccctgttcacggcggaaaagctccttctgccaggacagcctgtgaagaaacaagacctccgaggacgtggccaaggaaggcccagatgctagcgggaagttgttagttggcactctttcatctctcaacaactgtgacacaggtcttcagggtgaagcccaaagcagctatcggttgcagcagcgggtaaggagggggcttcacctgagcctggccttctgggcgagcagttctacctgcacacttcaagacagcctccatgacccttttcacggcacaccgcctgcttttggtgtgaccggggtttcctgtgcaggcacatgttcttaaggaatgccatgcacacaggcctgaagagctggctcagcgggtagagcacaggttgctcttgtctgggatctgagctctgtccccagcacccacagagtgcttctggttgcctcagactccaggggtgcacaaggccatgtaagcaaagacatgtaagcaaagacagttgtacacagagaagtcaaacctttttgaaaaaaagaaacaccacgggctggagagatggctcagtggttaagaacactgaccactcttccagaggtcctgagttcaattcccagcaaccacatggtggctcacaaccatctgtaataggatctgatgcccccttctggtgtgtctgaagatagctacagtgtattcatatataaaataataaatacatccttttttttctttttttactattggatattttctttatttacatttcaaatgttatcccctttcctgatttacccccctcccagaagccccctatcccatcccccctcccctgcttctatgagggtgttcacccacccacccactcccacttccctgcccttgattcccctacactgggttatttatcaagccatcataggaccaaagacctctccttccattgatccatgacaaagccatcctctgcaacatatgcagcttgagctatgtgtacttcttggttgatggcatagtccctgggagttctggggcagtggggggttggggggagtctggttagttgatattattcttcctattggggttgcaaaccccttcaatgccttcagtcccttctctaactcctctattagggaccccgagctcagtccagtggttggctgctaacatccacctctgtatttgtaaggctctggcagggcctctcaagagacagccatatcaggctcctttcagcatgtacttcttggcacccacaacagtgtctggtttggtaacgctgtacggcatgaattccgaggtgggacaatctatgggtggcctttcattcagtctctgctctacactttatctccatatttgctccagtgagtattttgttctccttctaagaaggacagaagcacccacactttgctcgtccttcttattgagcttcatgtggtctgtgaattgtatcctggttatttggagctttggggctagtatccacttatcagtgagtacatattgtgtgtgttcttttgtgattgggttacctcactcaggatgatatcctccagatccatccatttgcctaagaatttcatgaattcatcgtttttaatagctgtgcagtactctgttgtggaaatgcaccacgttttctgtatccattcctctgttgaggggcatctgggttctttccagcttctggctattagaaataaggctgctatgaacatagtggagcatgtgtccttcttaccagttggagcatcttctgggtatatgcccaggagtagcatagctgggtcctcaggtaatactatgtccaattttctgaggaccggccaaactgatttccagagtggttgtacgagcttgtattcccaccagcaatggaggagtgttcctctttctccacatcctcaccaacatctgctgtcaacagagtttttaattttagccattctgactggtgtgaaatggaatctcagggtggttttgatttgtaattcaccaatgactaaggatgttgaacatttctttaggtgcttcttggccatttgatattcctcagttgaaaattctttgtttagctctctaccccattttttaatagggttatttggttctctggagtctaacttcttgagttctttgtatatattggatattagccctctatcggatgtaggattggtaaagatcttttcccaatctgttggtattgttttgtccttttgtcagtgtcctttgccttacagaagctttgcaattttatgaggtcccacttgtcgattctttttttttttttttttttttttttttcgagacagggtttctctgtatagccctggctgtcctggagctcactttgtagaccaggctggcctcgaactcagaaatccgcctgcctctgcctcccgagtgctgggattaaaggcgtgcaccaccacacccggctccatttgtcgattcttgatcttacagcattagccattggtgttctattaaggaattttttcccctgtacccgtatgtttgaggctctttccaaattgctcctctataaagagagagagggggagagggagaaggagagagcaaggaaggaagaaaagagaagagacaagacaagaaggaaaaggagagaaaagaaaagagaaaaaagaaatgaaaagaagagaagagaaaagagaaaaaagaaaagaaagaccatgcacttgagggcactttgtttatgttgatagttcttggagaagctgagcgccgtctaagattcatgtaaaagcctcatgagaaatcagtgctttcacagacacatgtaaatagcaacaggcctgtgagcacagctacacaggggagctggctgcactccactagaattgccacgacgtacctatcacagtgacgtctacagtgagaaatgctgttctagactcattacatatgtaatcatttaaatgtaatcatttagagcctgggcagaaatctataacctatgaaaatgttcatttaaaatcaggtcaggcacaagtgtgcctggcttgttctcatcccagctgcctaggaatgtgggccaacctcagccacatagcaagagcctgtcgtacacatatgtacaggtgtagaggtatgtgtgcatgtatataggtactatataaaatacagagcccagagcctgtgatgcttcagatggcctcggacttctctggagacctggggaacgtgttaacaaagccttccctaaccccatggaagccgtgtgtccctgtgtgcattggtcctttggtgtttgcctccctctgtattgcagaagctctttgagcagggtctcagttcctccctgtggccccccagcccctgtgacagtgcagcgctggcacagacagtgcccacagctaccgaatgaatgagatctgaaattgaagcagatgactgttctggctgtttgtgtaatgaaataaccacgtttgtgtgtttctatgcatcacctttgtgtctgcatccttttatatttttgtctggagccccactgttgtatatcgacaaacctaacacacaccggaaccaggactctggatctcaggtgctgctcctttaaactggaatccgtgaggcagaggtgccgtctacaacccgttcctgacagcaggacttgcattctggcattctggatccacactgctgtcccttccaagtgttactgtctctcattcctctgtctctgagatcccttctgctctacctcaagagactaagagggtgaacacagtttgtacttttcatcttccttacagagaaggaaataataaattcatatttgttcccaagaaaaaaaaaaaaaa

SEQ ID NO: 173 - DNA, 3904 bp, Rattus novergicus
dctgtcgggtgcggtctttccggaagtgtgggtagagcgtggcaggggccttcagggtccgagctcagagcaccaggactggaccgcgcccggtactttccgagccgctcgctcgcggagagggcggggcgttggtagaggaggagtaccgggcggagggggcggggcagaggggcggggcgtcaggaagagggcctagctaccctggagtcatcttcagctccgctgtactgctgaagaggaagatgtgagcaacgggtccggcctcccaagacgatgctcgctgtcgtaggcgctgcggccctggtgctggtggcaggggcgccttggatgctgcccgtagcctcaggtgaagacaatctaaggcctcctgaggatgtagccatctacattatagacgacaactataccctaaagtggaaccaccacagagaatcaatgggcaacgtgactttttcagcagaatatcaaaaaggagaaggaaggatctggttaaaagtgcccaaatgtcaacatattacaaggaccaaatgtgaattctctttactgggcataaatgtttacagcaagacacagtttcgtgtaagagcagaagaagggaatagcacttcttcatggaatgaggctgattcatttattccattctacaaagctcacgtcagccccccaagagtacatttaaaagctgaagataaagccatactagtctacatctctcctcccggagaagacggaaccatgtgggcacaggagaaacgctgcttcaattacacgatacggatctgggggaggtcttttcctgtcagagaaattaaacctatgtattttccaaaaaagatatcaaagctcttgccagagactacctactgtttagaagtcagagcagtgcacacatcgcttcagagacacagcaactatagctcagcgcggtgtataaacaccacagtggcaaataaaatacctgtgccagaaaatctagaagtggatgtccaaggtgacagctatgttctgaaatgggaccacgcatttgcaaacatgaccttcaaagcacagtggatccctgtctattcaaaaagtagtcctggaaaccattcagacaaatggaaaccaatacctacctgtgcaaatgtgcagactacacactgtgtatctcctcgagagactttccacacaggaactttctttctccgtgtacaagcctcagatggaaataacacgtccttttggtctgaagagaaacttattgattctcaaaaatacactctccttcctcctccggtcattgctgtcacccccacgggggactccttgcttgtttatgtcagctgtaaggacagcaaatgtaatggactcatttacgaagtcatcttttgggaaaacacttccaatactgagaaaagacaacacccacaaagcatgattaaagaacacccagagttcaacgttgtgaacctgcggccgctgactgtgtactgtgtccaggctagagtgctctccactggcgtgtggaataagaccagtaaattcagtgataagctgtgtaagaaaacacatccaggaaactcttctgtgacctggattataactggatttggtgctctactcttctctgccatggccttttatgctgggaggagcctccaaaaatacctgtattacgtgttctccccaccactcaagcctccctgcagtatcgacgagtttttctcagagctgccttccaaaagccttctgcttctgactgctgaagagcacaccgagaggtgcttcgtcattgagaacacaggtgtggttgctggagaggagaatcgcgcacctgaggaggagctcaggaagtacagttcccagagcagccaggactcagggaactactccaacgaagaggaggagagtgtggggcctgagagtggccaggatatgctttccacagctcccagtgggtctccatggagcctgccctgccctgctggcaccttggaagatggtgcctgcttcccgggaaaagaaaagcaccttcagagcccagtcctgaggacacagccagctctccacggctgacacaggctcgccgtagtctggagtacatgtggatgagacaggcttaactgaaggtgactgcccgtctctctctgctggcagcctaaaccccagggcgccatttggagccacagatgaggctcactgctgcaaggctgcctggtggttctgtcttcctgttcttaccctagcagacagcagtttagaacatccgctttttaatcctgctgtaacctctcagtgttgcaaaggtgctgttgtctacagtagtgcttcccagccataactccgcacagcagtggcttccgaccagacgtcactgaaccgcggggaaaggggacttggactagaggagccaacattgctctaaggtctcagcatggcctgggtatgcacgttgcactctagtacttggggaagtagaaaatggcagggacaaaatgcagacgtgaagtcattcaggaagagagaagctagtgagtctgatgagagaagaccatgtacactcagtgtttgtatgaatgtctctgtatctttcctgtgattctttataaagccagacagaccctctctcctccagccagcactcttcaggtccccttctcagctccatgtacttaacaaaaaccagtgttggatactaggggaagggatagtgctgcctggcggtgcctctaagtaaccttaaattgacgctctgtgagtctgttttgtgggcaggatacctagcaatcctgggggctgcagggcagactctcagtctcaggccagaaaggaagagataggactgatggatcctagccatggctcactcccctgagccattttaaggattctccccaggactgcccatcctgtgctcaccacaggaaaagtaccttttgccaggatggcctgcaaagaaacaagacctgtcaggatgggggcggggggtgaagggaaggcccgggcgttaacactaagttgtcacttggcgttgtatcctccctcacaagtgcgagcgagcgcaggtcttcaggctaaggcagtggcaggtgaggaggcgacttcacctgagcctggccttctaggcaagcaaaggcagttccattgcatgcttcatgacagcctcgtgaagcctcccacagggcactgcctgcctgtgtgacaaggttttcctgaacagacacatgttcttaaggaatgccatgcacgtggcctgaagaactggcccagtgggtaagagcactgaatgctcttctacaggatctgagttcagtcccctgcacccactggatacttcacagctgactggagctttagccacagaggatacagcactgacttctggttgcttcagacaccagggtgcacatatgtgtaagcaagatacttgtacacagagaagcaaaaccttttttaaaaaaaagaaacactgtgcacttgagggcaccaaccgcctaatccttgttcactgatagttcttggggaagctgagccgtctaagaaccgtgtaaaagacaagagtgaggtgctttcacatacacatgaaatagtaacgggcccatgaacacacctacctgggagctggctgcactccattagacttgccacaaggcaccgttacagaaaagcctacaattagaaatgctgtttagacaaggatcacttaaagcttgggcagaaatctgaaacctgtgggaattgtcatttaaaactaggtcaggagctggagagatggctcagcagttaatagcactgaatgctcttccagaggtcctgagttcaaatcccagcaaccacgtgatggctcacaaccatctgtaatgagatctgatccccttttctggtgtgtctgaagacagcgacagtgtacttacttaataaa

SEQ ID NO: 174 - DNA, 4094 bp, Rattus novergicus
dctgtcgggtgcggtctttccggaagtgtgggtagagcgtggcaggggccttcagggtccgagctcagagcaccaggactggaccgcgcccggtactttccgagccgctcgctcgcggagagggcggggcgttggtagaggaggagtaccgggcggagggggcggggcagaggggcggggcgtcaggaagagggcctagctaccctggagtcatcttcagctccgctgtactgctgaagaggaagatgtgagcaacgggtccggcctcccaagacgatgctcgctgtcgtaggcgctgcggccctggtgctggtggcaggggcgccttggatgctgcccgtagcctcaggtgaagacaatctaaggcctcctgaggatgtagccatctacattatagacgacaactataccctaaagtggaaccaccacagagaatcaatgggcaacgtgactttttcagcagaatatcaaaaatgtttttcttctgccattacaaagctacctccttatgtgggctttagtgaaggtcatggggcagcacctgctaaagtgtgctaacgtgtgaccttccaggcctcacgagataagactcctggctcccttcagtgagtggcacagtactgtggcatgacgtagaccttgggaagcacataacctctgaagaggagaaggaaggatctggttaaaagtgcccaaatgtcaacatattacaaggaccaaatgtgaattctctttactgggcataaatgtttacagcaagacacagtttcgtgtaagagcagaagaagggaatagcacttcttcatggaatgaggctgattcatttattccattctacaaagctcacgtcagccccccaagagtacatttaaaagctgaagataaagccatactagtctacatctctcctcccggagaagacggaaccatgtgggcacaggagaaacgctgcttcaattacacgatacggatctgggggaggtcttttcctgtcagagaaattaaacctatgtattttccaaaaaagatatcaaagctcttgccagagactacctactgtttagaagtcagagcagtgcacacatcgcttcagagacacagcaactatagctcagcgcggtgtataaacaccacagtggcaaataaaatacctgtgccagaaaatctagaagtggatgtccaaggtgacagctatgttctgaaatgggaccacgcatttgcaaacatgaccttcaaagcacagtggatccctgtctattcaaaaagtagtcctggaaaccattcagacaaatggaaaccaatacctacctgtgcaaatgtgcagactacacactgtgtatctcctcgagagactttccacacaggaactttctttctccgtgtacaagcctcagatggaaataacacgtccttttggtctgaagagaaacttattgattctcaaaaatacactctccttcctcctccggtcattgctgtcacccccacgggggactccttgcttgtttatgtcagctgtaaggacagcaaatgtaatggactcatttacgaagtcatcttttgggaaaacacttccaatactgagaaaagacaacacccacaaagcatgattaaagaacacccagagttcaacgttgtgaacctgcggccgctgactgtgtactgtgtccaggctagagtgctctccactggcgtgtggaataagaccagtaaattcagtgataagctgtgtaagaaaacacatccaggaaactcttctgtgacctggattataactggatttggtgctctactcttctctgccatggccttttatgctgggaggagcctccaaaaatacctgtattacgtgttctccccaccactcaagcctccctgcagtatcgacgagtttttctcagagctgccttccaaaagccttctgcttctgactgctgaagagcacaccgagaggtgcttcgtcattgagaacacaggtgtggttgctggagaggagaatcgcgcacctgaggaggagctcaggaagtacagttcccagagcagccaggactcagggaactactccaacgaagaggaggagagtgtggggcctgagagtggccaggatatgctttccacagctcccagtgggtctccatggagcctgccctgccctgctggcaccttggaagatggtgcctgcttcccgggaaaagaaaagcaccttcagagcccagtcctgaggacacagccagctctccacggctgacacaggctcgccgtagtctggagtacatgtggatgagacaggcttaactgaaggtgactgcccgtctctctctgctggcagcctaaaccccagggcgccatttggagccacagatgaggctcactgctgcaaggctgcctggtggttctgtcttcctgttcttaccctagcagacagcagtttagaacatccgctttttaatcctgctgtaacctctcagtgttgcaaaggtgctgttgtctacagtagtgcttcccagccataactccgcacagcagtggcttccgaccagacgtcactgaaccgcggggaaaggggacttggactagaggagccaacattgctctaaggtctcagcatggcctgggtatgcacgttgcactctagtacttggggaagtagaaaatggcagggacaaaatgcagacgtgaagtcattcaggaagagagaagctagtgagtctgatgagagaagaccatgtacactcagtgtttgtatgaatgtctctgtatctttcctgtgattctttataaagccagacagaccctctctcctccagccagcactcttcaggtccccttctcagctccatgtacttaacaaaaaccagtgttggatactaggggaagggatagtgctgcctggcggtgcctctaagtaaccttaaattgacgctctgtgagtctgttttgtgggcaggatacctagcaatcctgggggctgcagggcagactctcagtctcaggccagaaaggaagagataggactgatggatcctagccatggctcactcccctgagccattttaaggattctccccaggactgcccatcctgtgctcaccacaggaaaagtaccttttgccaggatggcctgcaaagaaacaagacctgtcaggatgggggcggggggtgaagggaaggcccgggcgttaacactaagttgtcacttggcgttgtatcctccctcacaagtgcgagcgagcgcaggtcttcaggctaaggcagtggcaggtgaggaggcgacttcacctgagcctggccttctaggcaagcaaaggcagttccattgcatgcttcatgacagcctcgtgaagcctcccacagggcactgcctgcctgtgtgacaaggttttcctgaacagacacatgttcttaaggaatgccatgcacgtggcctgaagaactggcccagtgggtaagagcactgaatgctcttctacaggatctgagttcagtcccctgcacccactggatacttcacagctgactggagctttagccacagaggatacagcactgacttctggttgcttcagacaccagggtgcacatatgtgtaagcaagatacttgtacacagagaagcaaaaccttttttaaaaaaaagaaacactgtgcacttgagggcaccaaccgcctaatccttgttcactgatagttcttggggaagctgagccgtctaagaaccgtgtaaaagacaagagtgaggtgctttcacatacacatgaaatagtaacgggcccatgaacacacctacctgggagctggctgcactccattagacttgccacaaggcaccgttacagaaaagcctacaattagaaatgctgtttagacaaggatcacttaaagcttgggcagaaatctgaaacctgtgggaattgtcatttaaaactaggtcaggagctggagagatggctcagcagttaatagcactgaatgctcttccagaggtcctgagttcaaatcccagcaaccacgtgatggctcacaaccatctgtaatgagatctgatccccttttctggtgtgtctgaagacagcgacagtgtacttacttaataaa

SEQ ID NO: 175 - protein, 558 aa, Homo sapiens
PMMVVLLGATTLVLVAVAPWVLSAAAGGKNLKSPQKVEVDIIDDNFILRWNRSDESVGNVTFSFDYQKTGMDNWIKLSGCQNITSTKCNFSSLKLNVYEEIKLRIRAEKENTSSWYEVDSFTPFRKAQIGPPEVHLEAEDKAIVIHISPGTKDSVMWALDGLSFTYSLVIWKNSSGVEERIENIYSRHKIYKLSPETTYCLKVKAALLTSWKIGVYSPVHCIKTTVENELPPPENIEVSVQNQNYVLKWDYTYANMTFQVQWLHAFLKRNPGNHLYKWKQIPDCENVKTTQCVFPQNVFQKGIYLLRVQASDGNNTSFWSEEIKFDTEIQAFLLPPVFNIRSLSDSFHIYIGAPKQSGNTPVIQDYPLIYEIIFWENTSNAERKIIEKKTDVTVPNLKPLTVYCVKARAHTMDEKLNKSSVFSDAVCEKTKPGNTSKIWLIVGICIALFALPFVIYAAKVFLRCINYVFFPSLKPSSSIDEYFSEQPLKNLLLSTSEEQIEKCFIIENISTIATVEETNQTDEDHKKYSSQTSQDSGNYSNEDESESKTSEELQQDFV

SEQ ID NO: 176 - protein, 552 aa, Homo sapiens
PMMVVLLGATTLVLVAVAPWVLSAAAGGKNLKSPQKVEVDIIDDNFILRWNRSDESVGNVTFSFDYQKTGMDNWIKLSGCQNITSTKCNFSSLKLNVYEEIKLRIRAEKENTSSWYEVDSFTPFRKAQIGPPEVHLEAEDKAIVIHISPGTKDSVMWALDGLSFTYSLVIWKNSSGVEERIENIYSRHKIYKLSPETTYCLKVKAALLTSWKIGVYSPVHCIKTTVENELPPPENIEVSVQNQNYVLKWDYTYANMTFQVQWLHAFLKRNPGNHLYKWKQIPDCENVKTTQCVFPQNVFQKGIYLLRVQASDGNNTSFWSEEIKFDTEIQVFNIRSLSDSFHIYIGAPKQSGNTPVIQDYPLIYEIIFWENTSNAERKIIEKKTDVTVPNLKPLTVYCVKARAHTMDEKLNKSSVFSDAVCEKTKPGNTSKIWLIVGICIALFALPFVIYAAKVFLRCINYVFFPSLKPSSSIDEYFSEQPLKNLLLSTSEEQIEKCFIIENISTIATVEETNQTDEDHKKYSSQTSQDSGNYSNEDESESKTSEELQQDFV

SEQ ID NO: 177 - protein, 591 aa, Mus musculus
PMLAVVGAAALVLVAGAPWVLPSAAGGENLKPPENIDVYIIDDNYTLKWSSHGESMGSVTFSAEYRTKDEAKWLKVPECQHTTTTKCEFSLLDTNVYIKTQFRVRAEEGNSTSSWNEVDPFIPFYTAHMSPPEVRLEAEDKAILVHISPPGQDGNMWALEKPSFSYTIRIWQKSSSDKKTINSTYYVEKIPELLPETTYCLEVKAIHPSLKKHSNYSTVQCISTTVANKMPVPGNLQVDAQGKSYVLKWDYIASADVLFRAQWLPGYSKSSSGSRSDKWKPIPTCANVQTTHCVFSQDTVYTGTFFLHVQASEGNHTSFWSEEKFIDSQKHILPPPPVITVTAMSDTLLVYVNCQDSTCDGLNYEIIFWENTSNTKISMEKDGPEFTLKNLQPLTVYCVQARVLFRALLNKTSNFSEKLCEKTRPGSFSTIWIITGLGVVFFSVMVLYALRSVWKYLCHVCFPPLKPPRSIDEFFSEPPSKNLVLLTAEEHTERCFIIENTDTVAVEVKHAPEEDLRKYSSQTSQDSGNYSNEEEESVGTESGQAVLSKAPCGGPCSVPSPPGTLEDGTCFLGNEKYLQSPALRTEPALLC

SEQ ID NO: 178 - protein, 464 aa, Mus musculus
PMSPPEVRLEAEDKAILVHISPPGQDGNMWALEKPSFSYTIRIWQKSSSDKKTINSTYYVEKIPELLPETTYCLEVKAIHPSLKKHSNYSTVQCISTTVANKMPVPGNLQVDAQGKSYVLKWDYIASADVLFRAQWLPGYSKSSSGSRSDKWKPIPTCANVQTTHCVFSQDTVYTGTFFLHVQASEGNHTSFWSEEKFIDSQKHILPPPPVITVTAMSDTLLVYVNCQDSTCDGLNYEIIFWENTSNTKISMEKDGPEFTLKNLQPLTVYCVQARVLFRALLNKTSNFSEKLCEKTRPGSFSTIWIITGLGVVFFSVMVLYALRSVWKYLCHVCFPPLKPPRSIDEFFSEPPSKNLVLLTAEEHTERCFIIENTDTVAVEVKHAPEEDLRKYSSQTSQDSGNYSNEEEESVGTESGQAVLSKAPCGGPCSVPSPPGTLEDGTCFLGNEKYLQSPALRTEPALLC

SEQ ID NO: 179 - protein, 599 aa, Mus musculus
PAAARPPKTMLAVVGAAALVLVAGAPWVLPSAAGGENLKPPENIDVYIIDDNYTLKWSSHGESMGSVTFSAEYRTKDEAKWLKVPECQHTTTTKCEFSLLDTNVYIKTQFRVRAEEGNSTSSWNEVDPFIPFYTAHMSPPEVRLEAEDKAILVHISPPGQDGNMWALEKPSFSYTIRIWQKSSSDKKTINSTYYVEKIPELLPETTYCLEVKAIHPSLKKHSNYSTVQCISTTVANKMPVPGNLQVDAQGKSYVLKWDYIASADVLFRAQWLPGYSKSSSGSRSDKWKPIPTCANVQTTHCVFSQDTVYTGTFFLHVQASEGNHTSFWSEEKFIDSQKHILPPPPVITVTAMSDTLLVYVNCQDSTCDGLNYEIIFWENTSNTKISMEKDGPEFTLKNLQPLTVYCVQARVLFRALLNKTSNFSEKLCEKTRPGSFSTIWIITGLGVVFFSVMVLYALRSVWKYLCHVCFPPLKPPRSIDEFFSEPPSKNLVLLTAEEHTERCFIIENTDTVAVEVKHAPEEDLRKYSSQTSQDSGNYSNEEEESVGTESGQAVLSKAPCGGPCSVPSPPGTLEDGTCFLGNEKYLQSPALRTEPALLC

SEQ ID NO: 180 - protein, 594 aa, Rattus novergicus
PMLAVVGAAALVLVAGAPWMLPVASGEDNLRPPEDVAIYIIDDNYTLKWNHHRESMGNVTFSAEYQKGEGRIWLKVPKCQHITRTKCEFSLLGINVYSKTQFRVRAEEGNSTSSWNEADSFIPFYKAHVSPPRVHLKAEDKAILVYISPPGEDGTMWAQEKRCFNYTIRIWGRSFPVREIKPMYFPKKISKLLPETTYCLEVRAVHTSLQRHSNYSSARCINTTVANKIPVPENLEVDVQGDSYVLKWDHAFANMTFKAQWIPVYSKSSPGNHSDKWKPIPTCANVQTTHCVSPRETFHTGTFFLRVQASDGNNTSFWSEEKLIDSQKYTLLPPPVIAVTPTGDSLLVYVSCKDSKCNGLIYEVIFWENTSNTEKRQHPQSMIKEHPEFNVVNLRPLTVYCVQARVLSTGVWNKTSKFSDKLCKKTHPGNSSVTWIITGFGALLFSAMAFYAGRSLQKYLYYVFSPPLKPPCSIDEFFSELPSKSLLLLTAEEHTERCFVIENTGVVAGEENRAPEEELRKYSSQSSQDSGNYSNEEEESVGPESGQDMLSTAPSGSPWSLPCPAGTLEDGACFPGKEKHLQSPVLRTQPALHG

SEQ ID NO: 181 - protein, 440 aa, Rattus novergicus
PMWAQEKRCFNYTIRIWGRSFPVREIKPMYFPKKISKLLPETTYCLEVRAVHTSLQRHSNYSSARCINTTVANKIPVPENLEVDVQGDSYVLKWDHAFANMTFKAQWIPVYSKSSPGNHSDKWKPIPTCANVQTTHCVSPRETFHTGTFFLRVQASDGNNTSFWSEEKLIDSQKYTLLPPPVIAVTPTGDSLLVYVSCKDSKCNGLIYEVIFWENTSNTEKRQHPQSMIKEHPEFNVVNLRPLTVYCVQARVLSTGVWNKTSKFSDKLCKKTHPGNSSVTWIITGFGALLFSAMAFYAGRSLQKYLYYVFSPPLKPPCSIDEFFSELPSKSLLLLTAEEHTERCFVIENTGVVAGEENRAPEEELRKYSSQSSQDSGNYSNEEEESVGPESGQDMLSTAPSGSPWSLPCPAGTLEDGACFPGKEKHLQSPVLRTQPALHG

SEQ ID NO: 182 - DNA, 2899 bp, Homo sapiens
dgcccgcgcttccgtatcgctcctcgtaggccggggctcggcgcgcgcacccgcactaaagacgcttcttcccggcgggtaggaatcccgccggcgagccgaacagttccccgagcgcagcccgcggaccaccacccggccgcacgggccgcttttgtcccccgcccgccgcttctgtccgagaggccgcccgcgaggcgcatcctgaccgcgagcgtcgggtcccagagccgggcgcggctggggcccgaggctagcatctctcgggagccgcaaggcgagagctgcaaagatgtaaaagtcaagagaagactctaaaaatagcaaagatgcttttgagccagaatgccttcatcttcagatcacttaatttggttctcatggtgtatatcagcctcgtgtttggtatttcatatgattcgcctgattacacagatgaatcttgcactttcaagatatcattgcgaaatttccggtccatcttatcatgggaattaaaaaaccactccattgtaccaactcactatacattgctgtatacaatcatgagtaaaccagaagatttgaaggtggttaagaactgtgcaaataccacaagatcattttgtgacctcacagatgagtggagaagcacacacgaggcctatgtcaccgtcctagaaggattcagcgggaacacaacgttgttcagttgctcacacaatttctggctggccatagacatgtcttttgaaccaccagagtttgagattgttggttttaccaaccacattaatgtgatggtgaaatttccatctattgttgaggaagaattacagtttgatttatctctcgtcattgaagaacagtcagagggaattgttaagaagcataaacccgaaataaaaggaaacatgagtggaaatttcacctatatcattgacaagttaattccaaacacgaactactgtgtatctgtttatttagagcacagtgatgagcaagcagtaataaagtctcccttaaaatgcaccctccttccacctggccaggaatcagaatcagcagaatctgccaaaataggaggaataattactgtgtttttgatagcattggtcttgacaagcaccatagtgacactgaaatggattggttatatatgcttaagaaatagcctccccaaagtcttgaattttcataactttttagcctggccatttcctaacctgccaccgttggaagccatggatatggtggaggtcatttacatcaacagaaagaagaaagtgtgggattataattatgatgatgaaagtgatagcgatactgaggcagcgcccaggacaagtggcggtggctataccatgcatggactgactgtcaggcctctgggtcaggcctctgccacctctacagaatcccagttgatagacccggagtccgaggaggagcctgacctgcctgaggttgatgtggagctccccacgatgccaaaggacagccctcagcagttggaactcttgagtgggccctgtgagaggagaaagagtccactccaggacccttttcccgaagaggactacagctccacggaggggtctgggggcagaattaccttcaatgtggacttaaactctgtgtttttgagagttcttgatgacgaggacagtgacgacttagaagcccctctgatgctatcgtctcatctggaagagatggttgacccagaggatcctgataatgtgcaatcaaaccatttgctggccagcggggaagggacacagccaacctttcccagcccctcttcagagggcctgtggtccgaagatgctccatctgatcaaagtgacacttctgagtcagatgttgaccttggggatggttatataatgagatgactccaaaactattgaatgaacttggacagacaagcacctacagggttctttgtctctgcatcctaacttgctgccttatcgtctgcaagtgttctccaagggaaggaggaggaaactgtggtgttcctttcttccaggtgacatcacctatgcacattcccagtatggggaccatagtatcattcagtgcattgtttacatattcaaagtggtgcactttgaaggaagcacatgtgcacctttcctttacactaatgcacttaggatgtttctgcatcatgtctaccagggagcagggttccccacagtttcagaggtggtccaggaccctatgatatttctcttctttcgttcttttttttttttttttttgagacagagtctcgttctgtcgcccaagctggagcgcaatggtgtgatcttggctcactgcaacatccgcctcccaggttcaagtgattctcctgcctcagcctccctcgcaagtagctgggattacaggcgcctgccaccatgcctagcaaatttttgtatttttagtagagacaggattttaccatgttggccaggctggtctcaaactcctgacctcaagtgatctgccctcctcagcctcgtaaagtgctgggattacaggggtgagccgctgtgcctggctggccctgtgatatttctgtgaaataaattgggccagggtgggagcagggaaagaaaaggaaaatagtagcaagagctgcaaagcaggcaggaagggaggaggagagccaggtgagcagtggagagaaggggggccctgcacaaggaaacagggaagagccatcgaagtttcagtcggtgagccttgggcacctcacccatgtcacatcctgtctcctgcaattggaattccaccttgtccagccctccccagttaaagtggggaagacagactttaggatcacgtgtgtgactaatacagaaaggaaacatggcgtcggggagagggataaaacctgaatgccatattttaagttaaaaaaaaa

SEQ ID NO: 183 - DNA, 1429 bp, Homo sapiens
dgcccgcgcttccgtatcgctcctcgtaggccggggctcggcgcgcgcacccgcactaaagacgcttcttcccggcgggtaggaatcccgccggcgagccgaacagttccccgagcgcagcccgcggaccaccacccggccgcacgggccgcttttgtcccccgcccgccgcttctgtccgagaggccgcccgcgaggcgcatcctgaccgcgagcgtcgggtcccagagccgggcgcggctggggcccgaggctagcatctctcgggagccgcaaggcgagagctgcaaagtttaattagacacttcagaattttgatcacctaatgttgatttcagatgtaaaagtcaagagaagactctaaaaatagcaaagatgcttttgagccagaatgccttcatcttcagatcacttaatttggttctcatggtgtatatcagcctcgtgtttggtatttcatatgattcgcctgattacacagatgaatcttgcactttcaagatatcattgcgaaatttccggtccatcttatcatgggaattaaaaaaccactccattgtaccaactcactatacattgctgtatacaatcatgagtaaaccagaagatttgaaggtggttaagaactgtgcaaataccacaagatcattttgtgacctcacagatgagtggagaagcacacacgaggcctatgtcaccgtcctagaaggattcagcgggaacacaacgttgttcagttgctcacacaatttctggctggccatagacatgtcttttgaaccaccagagtttgagattgttggttttaccaaccacattaatgtgatggtgaaatttccatctattgttgaggaagaattacagtttgatttatctctcgtcattgaagaacagtcagagggaattgttaagaagcataaacccgaaataaaaggaaacatgagtggaaatttcacctatatcattgacaagttaattccaaacacgaactactgtgtatctgtttatttagagcacagtgatgagcaagcagtaataaagtctcccttaaaatgcaccctccttccacctggccaggaatcagaatcagcagaatctgccaaaataggaggaataattactgtgtttttgatagcattggtcttgacaagcaccatagtgacactgaaatggattggttatatatgcttaagaaatagcctccccaaagtcttgaggcaaggtctcgctaagggctggaatgcagtggctattcacaggtgcagtcataatgcactacagtctgaaactcctgagctcaaacagtcgtcctgcctaagcttccccagtagctgggattacaagcgtgcatccctgtgccccagtgattaagttttattatgtagaaaataaagagcaaacagtacagctgaaaaaaaaaaaaaaaaaa

SEQ ID NO: 184 - DNA, 1383 bp, Homo sapiens
dgcccgcgcttccgtatcgctcctcgtaggccggggctcggcgcgcgcacccgcactaaagacgcttcttcccggcgggtaggaatcccgccggcgagccgaacagttccccgagcgcagcccgcggaccaccacccggccgcacgggccgcttttgtcccccgcccgccgcttctgtccgagaggccgcccgcgaggcgcatcctgaccgcgagcgtcgggtcccagagccgggcgcggctggggcccgaggctagcatctctcgggagccgcaaggcgagagctgcaaagatgtaaaagtcaagagaagactctaaaaatagcaaagatgcttttgagccagaatgccttcatcttcagatcacttaatttggttctcatggtgtatatcagcctcgtgtttggtatttcatatgattcgcctgattacacagatgaatcttgcactttcaagatatcattgcgaaatttccggtccatcttatcatgggaattaaaaaaccactccattgtaccaactcactatacattgctgtatacaatcatgagtaaaccagaagatttgaaggtggttaagaactgtgcaaataccacaagatcattttgtgacctcacagatgagtggagaagcacacacgaggcctatgtcaccgtcctagaaggattcagcgggaacacaacgttgttcagttgctcacacaatttctggctggccatagacatgtcttttgaaccaccagagtttgagattgttggttttaccaaccacattaatgtgatggtgaaatttccatctattgttgaggaagaattacagtttgatttatctctcgtcattgaagaacagtcagagggaattgttaagaagcataaacccgaaataaaaggaaacatgagtggaaatttcacctatatcattgacaagttaattccaaacacgaactactgtgtatctgtttatttagagcacagtgatgagcaagcagtaataaagtctcccttaaaatgcaccctccttccacctggccaggaatcagaatcagcagaatctgccaaaataggaggaataattactgtgtttttgatagcattggtcttgacaagcaccatagtgacactgaaatggattggttatatatgcttaagaaatagcctccccaaagtcttgaggcaaggtctcgctaagggctggaatgcagtggctattcacaggtgcagtcataatgcactacagtctgaaactcctgagctcaaacagtcgtcctgcctaagcttccccagtagctgggattacaagcgtgcatccctgtgccccagtgattaagttttattatgtagaaaataaagagcaaacagtacagctgaaaaaaaaaaaaaaaaaa

SEQ ID NO: 185 - DNA, 3052 bp, Mus musculus
dccgggccccgcctctcgcctcgttctctgttcaccgctaaccccgcggctgggaacccttggcctccgggagcctgcgtggtctagccctagaccaggggaaaccaggctgccagcggagactcttcgggtcgcggggcaccggccatcccgccgccgtccctttcgcctggctcggctcccgcctgcctccactgctcgccagccgcgcgcagctgcgcctgatgcccagagcagctcggaggtggccccaggacatcccagagggggattcacgagacccggcgattcaggtgtgagagcagaaaaacggacttaagagctgagcaggatgcgttcacggtgcaccgtctctgccgtcggtctcctcagcttgtgtcttgtggtgtctgcgagcctagagactatcacaccgtctgcttttgatgggtatccagatgaaccttgcactataaacataacaatacgaaattcccggctaattttatcctgggaattagagaacaagtctggcccacccgctaactacaccctctggtacacagtcatgagcaaagacgaaaatctgacgaaggttaagaactgttcagataccacgaagtcatcatgtgacgtgacagataagtggttggagggcatggagagctacgtcgtcgccatcgtcatagtgcacagaggggacttgaccgtgtgccgctgctcagactacatcgtgcctgcaaacgctcctcttgagccgccagaatttgagatcgttggctttacagaccacataaacgtgacgatggaatttccacctgtcacttccaaaataatccaggaaaagatgaagactacaccctttgtcatcaaagaacagataggggacagcgttaggaagaagcacgagcccaaagtgaataatgtcactgggaacttcacatttgtccttagagacttacttccaaagacaaactactgtgtatctctttattttgatgatgaccccgcaataaaatctcccttaaaatgcatcgtccttcagcctggccaggaatcaggattatcagaatctgctatagtaggaataactacttcgtgtttggtagtgatggttttcgtgagcactatcgtaatgctgaaacggattggttatatatgcctaaaagacaatttgcccaatgtcttgaacttccgccactttttaacctggataatccctgaacggtcaccttcagaagccatcgatcggctggaaatcatccccacaaacaagaagaagagactgtggaattacgattatgaggatggcagtgacagtgacgaagaggtccccacagcaagtgtcactggctacaccatgcatggactgacgggcaagcctctgcaacaaacctctgacacctcagccagccccgaggatcccctgcatgaagaagattcaggcgctgaggaatctgatgaagctggagcaggggctggagctgagccagaactccccacagaggcgggggcggggccttcagaagaccccactggcccctatgagagaagaaagagtgtgctcgaggactcattccccagggaggacaacagctccatggatgagcctggggacaacattatcttcaacgtgaacttaaactctgtgtttctgagggttctccatgatgaagatgcctcagagacattatctctcgaagaagacaccatcctcctagacgaaggtccccagaggacagagtcagaccttcggatagctggtggggacaggacacagccgcccctccccagccttccttcccaggatctatggactgaagatgggtcatctgagaaatcagacacctcagattccgatgctgatgtgggggacggctacatcatgagatgactccaaagaggttcactgactggcgctgggcacctacagggtttctcttcagagtccgacttgatgccttgtggtctccaggtgtctgtcatggagggactagagaactctacagccctcttggcccttgctgattggccttctctatgcagattgacaatttgggcatcaggattgtttacaggggtcatgagcgtgatctgcccaccccctttccactaatgcactaaggtggtttgtgttacatttcccagggaacaggttcagtgtggttttcagaggcagcccaaggtctcctatccctatgttgtttctaggaaatgattaaattggggggagagaaagggaaagaaaaactggccaagcagtgttcaggaggactccaggaatgaacctgaaagggggcggaagggtcagaggtaaggcatgctgagctggctgctggcacaagaaaagccatcaaggtttgagcccctgctgtctgggcccttcccagatgtcaacatctgtctcctctactctaggaagttcattcacccataaagccccgcacagtgcacgtgaggagggggagaagccgcaggaataattctaggatccaacgcgtgactcagagagagggatatcatggccatattttaaggtcatttctcgtcacctctttaaccttcagttttctcaacttatgaaataaagggactgagcaggtagccttgggagagatgcccaaagtggatgaagggtgtagggtcctcccatcttactcttctcacccccaaaccagtgtttcacattttcttcttttcaaagaagaactggtacatgggtcctggctcaaagacttccaatggatcacccatgtaaagcggttcaaaagaaacccttgtgggactgataaaacccttgtcggactttttatcctgtgtgataaaaatcccacaggaaggagacacccccccccaaaaaaaaaaaaaaaaaacacagagcaaccctttctctgccctctgaatacagctatcctcattctcccggagcagcagctttcttttaagctttgcataattgctgggagttggctttttaatgcttgcacttcattgtttgtttgtttgtttttaaattttatacgatgtttgaaattgtcagtgtaatacaaaagtacttttcatacaaaaaaaa

SEQ ID NO: 186 - DNA, 1170 bp, Mus musculus
dccgggccccgcctctcgcctcgttctctgttcaccgctaaccccgcggctgggaacccttggcctccgggagcctgcgtggtctagccctagaccaggggaaaccaggctgccagcggagactcttcgggtcgcggggcaccggccatcccgccgccgtccctttcgcctggctcggctcccgcctgcctccactgctcgccagccgcgcgcagctgcgcctgatgcccagagcagctcggaggtggccccaggacatcccagagggggattcacgagacccggcgattcaggtgtgagagcagaaaaacggacttaagagctgagcaggatgcgttcacggtgcaccgtctctgccgtcggtctcctcagcttgtgtcttgtggtgtctgcgagcctagagactatcacaccgtctgcttttgatgggtatccagatgaaccttgcactataaacataacaatacgaaattcccggctaattttatcctgggaattagagaacaagtctggcccacccgctaactacaccctctggtacacagtcatgagcaaagacgaaaatctgacgaaggttaagaactgttcagataccacgaagtcatcatgtgacgtgacagataagtggttggagggcatggagagctacgtcgtcgccatcgtcatagtgcacagaggggacttgaccgtgtgccgctgctcagactacatcgtgcctgcaaacgctcctcttgagccgccagaatttgagatcgttggctttacagaccacataaacgtgacgatggaatttccacctgtcacttccaaaataatccaggaaaagatgaagactacaccctttgtcatcaaagaacagataggggacagcgttaggaagaagcacgagcccaaagtgaataatgtcactgggaacttcacatttgtccttagagacttacttccaaagacaaactactgtgtatctctttattttgatgatgaccccgcaataaaatctcccttaaaatgcatcgtccttcagcctggccaggaatcaggtatggctaggtttttaaaatttgcactattgttttgatggaaaacttgctgaaaggaaaagaaaaaatctcaagttctagcacactaaatgtactcctgccaataaatgcacaccactgagctgcccct

SEQ ID NO: 187 - protein, 516 aa, Homo sapiens
PMLLSQNAFIFRSLNLVLMVYISLVFGISYDSPDYTDESCTFKISLRNFRSILSWELKNHSIVPTHYTLLYTIMSKPEDLKVVKNCANTTRSFCDLTDEWRSTHEAYVTVLEGFSGNTTLFSCSHNFWLAIDMSFEPPEFEIVGFTNHINVMVKFPSIVEEELQFDLSLVIEEQSEGIVKKHKPEIKGNMSGNFTYIIDKLIPNTNYCVSVYLEHSDEQAVIKSPLKCTLLPPGQESESAESAKIGGIITVFLIALVLTSTIVTLKWIGYICLRNSLPKVLNFHNFLAWPFPNLPPLEAMDMVEVIYINRKKKVWDYNYDDESDSDTEAAPRTSGGGYTMHGLTVRPLGQASATSTESQLIDPESEEEPDLPEVDVELPTMPKDSPQQLELLSGPCERRKSPLQDPFPEEDYSSTEGSGGRITFNVDLNSVFLRVLDDEDSDDLEAPLMLSSHLEEMVDPEDPDNVQSNHLLASGEGTQPTFPSPSSEGLWSEDAPSDQSDTSESDVDLGDGYIMR

SEQ ID NO: 188 - protein, 332 aa, Homo sapiens
PMLLSQNAFIFRSLNLVLMVYISLVFGISYDSPDYTDESCTFKISLRNFRSILSWELKNHSIVPTHYTLLYTIMSKPEDLKVVKNCANTTRSFCDLTDEWRSTHEAYVTVLEGFSGNTTLFSCSHNFWLAIDMSFEPPEFEIVGFTNHINVMVKFPSIVEEELQFDLSLVIEEQSEGIVKKHKPEIKGNMSGNFTYIIDKLIPNTNYCVSVYLEHSDEQAVIKSPLKCTLLPPGQESESAESAKIGGIITVFLIALVLTSTIVTLKWIGYICLRNSLPKVLRQGLAKGWNAVAIHRCSHNALQSETPELKQSSCLSFPSSWDYKRASLCPSD

SEQ ID NO: 189 - protein, 240 aa, Homo sapiens
PMLLSQNAFIFRSLNLVLMVYISLVFGISYDSPDYTDESCTFKISLRNFRSILSWELKNHSIVPTHYTLLYTIMSKPEDLKVVKNCANTTRSFCDLTDEWRSTHEAYVTVLEGFSGNTTLFSCSHNFWLAIDMSFEPPEFEIVGFTNHINVMVKFPSIVEEELQFDLSLVIEEQSEGIVKKHKPEIKGNMSGNFTYIIDKLIPNTNYCVSVYLEHSDEQAVIKSPLKCTLLPPGQESEFS

SEQ ID NO: 190 - protein, 514 aa, Mus musculus
PMRSRCTVSAVGLLSLCLVVSASLETITPSAFDGYPDEPCTINITIRNSRLILSWELENKSGPPANYTLWYTVMSKDENLTKVKNCSDTTKSSCDVTDKWLEGMESYVVAIVIVHRGDLTVCRCSDYIVPANAPLEPPEFEIVGFTDHINVTMEFPPVTSKIIQEKMKTTPFVIKEQIGDSVRKKHEPKVNNVTGNFTFVLRDLLPKTNYCVSLYFDDDPAIKSPLKCIVLQPGQESGLSESAIVGITTSCLVVMVFVSTIVMLKRIGYICLKDNLPNVLNFRHFLTWIIPERSPSEAIDRLEIIPTNKKKRLWNYDYEDGSDSDEEVPTASVTGYTMHGLTGKPLQQTSDTSASPEDPLHEEDSGAEESDEAGAGAGAEPELPTEAGAGPSEDPTGPYERRKSVLEDSFPREDNSSMDEPGDNIIFNVNLNSVFLRVLHDEDASETLSLEEDTILLDEGPQRTESDLRIAGGDRTQPPLPSLPSQDLWTEDGSSEKSDTSDSDADVGDGYIMR

SEQ ID NO: 191 - protein, 248 aa, Mus musculus
PMRSRCTVSAVGLLSLCLVVSASLETITPSAFDGYPDEPCTINITIRNSRLILSWELENKSGPPANYTLWYTVMSKDENLTKVKNCSDTTKSSCDVTDKWLEGMESYVVAIVIVHRGDLTVCRCSDYIVPANAPLEPPEFEIVGFTDHINVTMEFPPVTSKIIQEKMKTTPFVIKEQIGDSVRKKHEPKVNNVTGNFTFVLRDLLPKTNYCVSLYFDDDPAIKSPLKCIVLQPGQESELPPLFNLDNP

SEQ ID NO: 192 - DNA, 379 bp, Artificial Sequence
  synthetic
dcaggtgcagctgcaggagtgggggggaggcttggtccagcctggggggtccctgagactctcctgtgcagcctctggattcaccgtcagtagcaactacatgagctgggtccgccaggctccagggaaggggctggagtgggtctcagttatttaccgtggtgggagtggtgataatacatactacgcaggctccgtgaagggccgattcaccatctccagagacaattccaagaacacggtgtatcttcaaatgaacagcctgagagctgaggacacggctgtgtattactgtgtgagatctagcgacgtgggctacggtattctccgtgggtacatggacgtctggggcaaagggaccacggtcaccgtctcctca

SEQ ID NO: 193 - protein, 127 aa, Artificial Sequence
  synthetic
PQVQLQEWGGGLVQPGGSLRLSCAASGFTVSSNYMSWVRQAPGKGLEWVSVIYRGGSGDNTYYAGSVKGRFTISRDNSKNTVYLQMNSLRAEDTAVYYCVRSSDVGYGILRGYMDVWGKGTTVTVSS

SEQ ID NO: 194 - DNA, 322 bp, Artificial Sequence
  synthetic
dcacgttatactgactcaaccgccctcagtgtccgtgtctccaggacagactgccaggatcccctgttcgggacaagacctgaccaacaaatatgtctcttggtatcaactgcagtcaggccagtcacctgcgctggtcatctatgaggactcaaagaggccctcagggatccctgagcgcttctctggctccaactctggagacacagccactctgaccatcaccgggacccaggctgcggatgaggctgactttttctgtcaggcgtacgacaccaacggttgggtgttcggcgcagggaccaagctgaccgtcctaggt

SEQ ID NO: 195 - protein, 108 aa, Artificial Sequence
  synthetic
PHVILTQPPSVSVSPGQTARIPCSGQDLTNKYVSWYQLQSGQSPALVIYEDSKRPSGIPERFSGSNSGDTATLTITGTQAADEADFFCQAYDTNGWVFGAGTKLTVLG

SEQ ID NO: 196 - protein, 6 aa, Artificial Sequence
  synthetic
PSNYMS

SEQ ID NO: 197 - protein, 20 aa, Artificial Sequence
  synthetic
PVIYRGGSGDNTYYAGSVKG

SEQ ID NO: 198 - protein, 16 aa, Artificial Sequence
  synthetic
PSSDVGYGILRGYMDV

SEQ ID NO: 199 - protein, 12 aa, Artificial Sequence
  synthetic
PSGQDLTNKYVS

SEQ ID NO: 200 - protein, 8 aa, Artificial Sequence
  synthetic
PEDSKRPS

SEQ ID NO: 201 - protein, 10 aa, Artificial Sequence
  synthetic
PQAYDTNGWV

SEQ ID NO: 202 - DNA, 385 bp, Artificial Sequence
  synthetic
dcaggtgcagctgcaggagtcgggcccaggagtggtgaagccttcggggaccctgtccctcacctgcgctatttctggtggctccatcggctctggtggctccatcagaagtactaggtggtggagttgggtccgccagtccccagggaaggggctggagtggataggcgaaatctatcatagtgggagcaccaactacaacccgtccctcaagagtcgcgtcaccatatcactagacaagtctaggaatcacttctccctgaggctgaactctgtgaccgccgcggacacggccgtttattactgtgcgagacaggactacggtgactccggcgactggtacttcgatctgtggggcaaggggacaatggtcaccgtctcctca

SEQ ID NO: 203 - protein, 129 aa, Artificial Sequence
  synthetic
PQVQLQESGPGVVKPSGTLSLTCAISGGSIGSGGSIRSTRWWSWVRQSPGKGLEWIGEIYHSGSTNYNPSLKSRVTISLDKSRNHFSLRLNSVTAADTAVYYCARQDYGDSGDWYFDLWGKGTMVTVSS

SEQ ID NO: 204 - DNA, 331 bp, Artificial Sequence
  synthetic
daattttatgctgactcagccccactctgtgtcggagtctccggggaagacggtaaccatctcctgcacccgcagcagtggcagcattgccagcaactctgtgcagtggtaccagcagcgcccgggcagttcccccaccactgtgatctatgaggataaccaaagaccctctggggtccctgatcggttctctggctccatcgacagctcctccaactctgcctccctcaccgtctctggactgaagactgaggacgaggctgactactactgtcagtcttctgatagcagcgctgtggtattcggcagtgggaccaagctgaccgtccta

SEQ ID NO: 205 - protein, 111 aa, Artificial Sequence
  synthetic
PNFMLTQPHSVSESPGKTVTISCTRSSGSIASNSVQWYQQRPGSSPTTVIYEDNQRPSGVPDRFSGSIDSSSNSASLTVSGLKTEDEADYYCQSSDSSAVVFGSGTKLTVL

SEQ ID NO: 206 - protein, 13 aa, Artificial Sequence
  synthetic
PSGGSIRSTRWWS

SEQ ID NO: 207 - protein, 17 aa, Artificial Sequence
  synthetic
PEIYHSGSTNYNPSLKS

SEQ ID NO: 208 - protein, 14 aa, Artificial Sequence
  synthetic
PQDYGDSGDWYFDL

SEQ ID NO: 209 - protein, 14 aa, Artificial Sequence
  synthetic
PTRSSGSIASNSVQ

SEQ ID NO: 210 - protein, 8 aa, Artificial Sequence
  synthetic
PEDNQRPS

SEQ ID NO: 211 - protein, 10 aa, Artificial Sequence
  synthetic
PQSSDSSAVV

SEQ ID NO: 212 - DNA, 358 bp, Artificial Sequence
  synthetic
dgaggtgcagctggtgcagtctggagctgaggtgaagaagcctggggcctcagtgaaagtctcctgcaaggcttctggttacagatttaccagctacggcatcagctgggtgcgacaggcccctggacaagggcttgagtggatgggatggatcagcgcttacaatggtaacacaaactacgcacagaagctccagggcagagtcaccatgaccacagacacatccacgaacacagcctacatggagctgaggagcctgagatctgacgacacggccgtgtattactgtgcgagagacgcggattatagtagtgggtctgggtactggggccagggaaccctggtcaccgtctcctca

SEQ ID NO: 213 - protein, 120 aa, Artificial Sequence
  synthetic
PEVQLVQSGAEVKKPGASVKVSCKASGYRFTSYGISWVRQAPGQGLEWMGWISAYNGNTNYAQKLQGRVTMTTDTSTNTAYMELRSLRSDDTAVYYCARDADYSSGSGYWGQGTLVTVSS

SEQ ID NO: 214 - DNA, 325 bp, Artificial Sequence
  synthetic
dtcctatgagctgactcagccaccctcggtgtcagtgtccccaggacagacggccaggatcacctgttctggagatgcattgccaaagcaatatgcttattggtaccagcagaagccaggccaggcccctgtgatggttatatataaagacactgagaggccctcagggatccctgagcgattctctggctccagctcagggacaaaagtcacgttgaccatcagtggagtccaggcagaagacgaggctgactattattgtcaatcagcagacaacagtattacttatagggtgttcggcggagggaccaaggtcaccgtccta

SEQ ID NO: 215 - protein, 109 aa, Artificial Sequence
  synthetic
PSYELTQPPSVSVSPGQTARITCSGDALPKQYAYWYQQKPGQAPVMVIYKDTERPSGIPERFSGSSSGTKVTLTISGVQAEDEADYYCQSADNSITYRVFGGGTKVTVL

SEQ ID NO: 216 - protein, 6 aa, Artificial Sequence
  synthetic
PSYGIS

SEQ ID NO: 217 - protein, 18 aa, Artificial Sequence
  synthetic
PWISAYNGNTNYAQKLQG

SEQ ID NO: 218 - protein, 11 aa, Artificial Sequence
  synthetic
PDADYSSGSGY

SEQ ID NO: 219 - protein, 12 aa, Artificial Sequence
  synthetic
PSGDALPKQYAY

SEQ ID NO: 220 - protein, 8 aa, Artificial Sequence
  synthetic
PKDTERPS

SEQ ID NO: 221 - protein, 12 aa, Artificial Sequence
  synthetic
PQSADNSITYRV

SEQ ID NO: 222 - protein, 124 aa, Artificial Sequence
  synthetic
PQVQLVQSGAEVKKPGASVKVSCKASGYTFTNYDIIWVRQAPGQGLEWMGYINPYNRRREYNEKFKGRVTMTRDTSTSTVYMELSSLRSEDTAVYYCARLLKYRRFRYYAIDYWGQGTTVTVSS

SEQ ID NO: 223 - protein, 108 aa, Artificial Sequence
  synthetic
PDIQMTQSPSSLSASVGDRVTITCRASENVYSNLAWYQQKPGKAPKLLIYAASNLQSGVPSRFSGSGSGTDFTFTISSLQPEDIATYYCQHFWGSPFTFGQGTKLEIK

SEQ ID NO: 224 - protein, 11 aa, Artificial Sequence
  synthetic
PGYTFTNYDII

SEQ ID NO: 225 - protein, 16 aa, Artificial Sequence
  synthetic
PYINPYNRRREYNEKF

SEQ ID NO: 226 - protein, 15 aa, Artificial Sequence
  synthetic
PLLKYRRFRYYAIDY

SEQ ID NO: 227 - protein, 12 aa, Artificial Sequence
  synthetic
PRASENVYSNLA

SEQ ID NO: 228 - protein, 8 aa, Artificial Sequence
  synthetic
PAASNLQS

SEQ ID NO: 229 - protein, 10 aa, Artificial Sequence
  synthetic
PQHFWGSPFT

SEQ ID NO: 230 - protein, 438 aa, Artificial Sequence
  synthetic
PQVQLVQSGAEVKKPGASVKVSCKASGYTFTNYDIIWVRQAPGQGLEWMGYINPYNDGTKYNEKFKGRVTMTRDTSTSTVYMELSSLRSEDTAVYYCARLLKYRRFRYYAIDYWGQGTTVTVSSASTKGPSVFPLAPCSRSTSESTAALGCLVKDYFPEPVTVSWNSGALTSGVHTFPAVLQSSGLYSLSSVVTVPSSNFGTQTYTCNVDHKPSNTKVDKTVAPPVAGPSVFLFPPKPKDTLMISRTPEVTCVVVDVSHEDPEVQFNWYVDGVEVHNAKTKPREEQFNSTFRVVSVLTVVHQDWLNGKEYKCKVSNKGLPSSIEKTISKTKGQPREPQVYTLPPSREEMTKNQVSLTCLVKGFYPSDIAVEWESNGQPENNYKTTPPMLDSDGSFFLYSKLTVDKSRWQQGNVFSCSVMHEALHNHYTQKSLSLSPGK

SEQ ID NO: 231 - protein, 214 aa, Artificial Sequence
  synthetic
PDIQMTQSPSSLSASVGDRVTITCRTSENVYSNLAWYQQKPGKAPKLLIYAASNLQSGVPSRFSGSGSGTDYTFTISSLQPEDIATYYCQHFWGSPFTFGQGTKLEIKTVAAPSVFIFPPSDEQLKSGTASVVCLLNNFYPREAKVQWKVDNALQSGNSQESVTEQDSKDSTYSLSSTLTLSKADYEKHKVYACEVTHQGLSSPVTKSFNRGEC

SEQ ID NO: 232 - protein, 6 aa, Artificial Sequence
  synthetic
PNYDII

SEQ ID NO: 233 - protein, 7 aa, Artificial Sequence
  synthetic
PPYNDGT

SEQ ID NO: 234 - protein, 15 aa, Artificial Sequence
  synthetic
PLLKYRRFRYYAIDY

SEQ ID NO: 235 - protein, 12 aa, Artificial Sequence
  synthetic
PRTSENVYSNLA

SEQ ID NO: 236 - protein, 8 aa, Artificial Sequence
  synthetic
PAASNLQS

SEQ ID NO: 237 - protein, 10 aa, Artificial Sequence
  synthetic
PQHFWGSPFT

SEQ ID NO: 238 - protein, 450 aa, Artificial Sequence
  synthetic
PEVQLVESGGGLVQPGGSLRLSCAASGFNIKDTYIHWVRQAPGKGLEWVARIYPTNGYTRYADSVKGRFTISADTSKNTAYLQMNSLRAEDTAVYYCSRWGGDGFYAMDYWGQGTLVTVSSASTKGPSVFPLAPSSKSTSGGTAALGCLVKDYFPEPVTVSWNSGALTSGVHTFPAVLQSSGLYSLSSVVTVPSSSLGTQTYICNVNHKPSNTKVDKKVEPKSCDKTHTCPPCPAPELLGGPSVFLFPPKPKDTLMISRTPEVTCVVVDVSHEDPEVKFNWYVDGVEVHNAKTKPREEQYNSTYRVVSVLTVLHQDWLNGKEYKCKVSNKALPAPIEKTISKAKGQPREPQVYTLPPSREEMTKNQVSLTCLVKGFYPSDIAVEWESNGQPENNYKTTPPVLDSDGSFFLYSKLTVDKSRWQQGNVFSCSVMHEALHNHYTQKSLSLSPG

SEQ ID NO: 239 - protein, 215 aa, Artificial Sequence
  synthetic
PDIQMTQSPSSLSASVGDRVTITCRASQDVNTAVAWYQQKPGKAPKLLIYSASFLYSGVPSRFSGSRSGTDFTLTISSLQPEDFATYYCQQHYTTPPTFGQGTKVEIKRTVAAPSVFIFPPSDEQLKSGTASVVCLLNNFYPREAKVQWKVDNALQSGNSQESVTEQDSKDSTYSLSSTLTLSKADYEKHKVYACEVTHQGLSSPVTKSFNRGEC

SEQ ID NO: 240 - protein, 11 aa, Artificial Sequence
  synthetic
PGFNIKDTYIH

SEQ ID NO: 241 - protein, 18 aa, Artificial Sequence
  synthetic
PRIYPTNGYTRYADSVKG

SEQ ID NO: 242 - protein, 12 aa, Artificial Sequence
  synthetic
PWGGDGFYAMDY

SEQ ID NO: 243 - protein, 12 aa, Artificial Sequence
  synthetic
PRASQDVNTAVA

SEQ ID NO: 244 - protein, 8 aa, Artificial Sequence
  synthetic
PSASFLYS

SEQ ID NO: 245 - protein, 10 aa, Artificial Sequence
  synthetic
PQQHYTTPPT

SEQ ID NO: 246 - protein, 449 aa, Artificial Sequence
  synthetic
PEVQLVESGGGLVQPGGSLRLSCAASGFTFTDYTMDWVRQAPGKGLEWVADVNPNSGGSIYNQRFKGRFTLSVDRSKNTLYLQMNSLRAEDTAVYYCARNLGPSFYFDYWGQGTLVTVSSASTKGPSVFPLAPSSKSTSGGTAALGCLVKDYFPEPVTVSWNSGALTSGVHTFPAVLQSSGLYSLSSVVTVPSSSLGTQTYICNVNHKPSNTKVDKKVEPKSCDKTHTCPPCPAPELLGGPSVFLFPPKPKDTLMISRTPEVTCVVVDVSHEDPEVKFNWYVDGVEVHNAKTKPREEQYNSTYRVVSVLTVLHQDWLNGKEYKCKVSNKALPAPIEKTISKAKGQPREPQVYTLPPSREEMTKNQVSLTCLVKGFYPSDIAVEWESNGQPENNYKTTPPVLDSDGSFFLYSKLTVDKSRWQQGNVFSCSVMHEALHNHYTQKSLSLSPG

SEQ ID NO: 247 - protein, 215 aa, Artificial Sequence
  synthetic
PDIQMTQSPSSLSASVGDRVTITCKASQDVSIGVAWYQQKPGKAPKLLIYSASYRYTGVPSRFSGSGSGTDFTLTISSLQPEDFATYYCQQYYIYPYTFGQGTKVEIKRTVAAPSVFIFPPSDEQLKSGTASVVCLLNNFYPREAKVQWKVDNALQSGNSQESVTEQDSKDSTYSLSSTLTLSKADYEKHKVYACEVTHQGLSSPVTKSFNRGEC

SEQ ID NO: 248 - protein, 12 aa, Artificial Sequence
  synthetic
PGFTFTDYTMDW

SEQ ID NO: 249 - protein, 17 aa, Artificial Sequence
  synthetic
PDVNPNSGGSIYNQRFK

SEQ ID NO: 250 - protein, 10 aa, Artificial Sequence
  synthetic
PLGPSFYFDY

SEQ ID NO: 251 - protein, 12 aa, Artificial Sequence
  synthetic
PKASQDVSIGVA

SEQ ID NO: 252 - protein, 7 aa, Artificial Sequence
  synthetic
PASYRYT

SEQ ID NO: 253 - protein, 10 aa, Artificial Sequence
  synthetic
PQQYYIYPYT

SEQ ID NO: 254 - DNA, 373 bp, Artificial Sequence
  synthetic
dcaggtgcaactggtggagtctgggggaggcgtggtccagcctgggaggtccctgagactctcctgtgcagcctctggattcaccttcagtagctatgctatgcactgggtccgccaggctccaggcaaggggctggagtgggtggcagttatatcatatgatggaaacaataaatactacgcagactccgtgaagggccgattcaccatctccagagacaattccaagaacacgctgtatctgcaaatgaacagcctgagagctgaggacacggctgtgtattactgtgcgagagccgtcccctggggatcgaggtactactactacggtatggacgtctggggccaagggaccacggtcaccgtctcctca

SEQ ID NO: 255 - protein, 125 aa, Artificial Sequence
  synthetic
PQVQLVESGGGVVQPGRSLRLSCAASGFTFSSYAMHWVRQAPGKGLEWVAVISYDGNNKYYADSVKGRFTISRDNSKNTLYLQMNSLRAEDTAVYYCARAVPWGSRYYYYGMDVWGQGTTVTVSS

SEQ ID NO: 256 - DNA, 322 bp, Artificial Sequence
  synthetic
dgccatccagttgacccagtctccatcctccctgtctgcatctgtaggagacagagtcaccatcacttgccgggcaagtcagggcattagcagtgctttagcctggtatcagcagaaatcagggaaagctcctaagctcctgatctttgatgcctccagtttggaaagtggggtcccatcaaggttcagcggcagtggatctgggacagatttcactctcaccatcagcagcctgcagcctgaagattttgcaacttattactgtcaacagtttaacagttatcctctcactttcggcggagggaccaaggtggagatcaaa

SEQ ID NO: 257 - protein, 108 aa, Artificial Sequence
  synthetic
PAIQLTQSPSSLSASVGDRVTITCRASQGISSALAWYQQKSGKAPKLLIFDASSLESGVPSRFSGSGSGTDFTLTISSLQPEDFATYYCQQFNSYPLTFGGGTKVEIK

SEQ ID NO: 258 - protein, 6 aa, Artificial Sequence
  synthetic
PSYAMH

SEQ ID NO: 259 - protein, 17 aa, Artificial Sequence
  synthetic
PVISYDGNNKYYADSVK

SEQ ID NO: 260 - protein, 16 aa, Artificial Sequence
  synthetic
PAVPWGSRYYYYGMDV

SEQ ID NO: 261 - protein, 12 aa, Artificial Sequence
  synthetic
PRASQGISSALA

SEQ ID NO: 262 - protein, 8 aa, Artificial Sequence
  synthetic
PDASSLES

SEQ ID NO: 263 - protein, 10 aa, Artificial Sequence
  synthetic
PQQFNSYPLT

SEQ ID NO: 264 - DNA, 358 bp, Artificial Sequence
  synthetic
dgaggtgcagctggtgcagtctggagcagaggtgaaaaagcccggggagtctctgaagatctcctgtaagggttctggatacagctttaccagtaactggatcggctgggtgcgccagatgcccgggaaaggcctggagtggatggggatcatctatcctggtgactctgataccagatacagcccgtccttccaaggccaggtcaccatctcagccgacaagtccatcagcaccgcctacctgcagtggagcagcctgaaggcctcggacaccgccatgtattactgtgcgaggcaaactggtttcctctggtcctccgatctctggggccgtggcaccctggtcactgtctcctca

SEQ ID NO: 265 - protein, 120 aa, Artificial Sequence
  synthetic
PEVQLVQSGAEVKKPGESLKISCKGSGYSFTSNWIGWVRQMPGKGLEWMGIIYPGDSDTRYSPSFQGQVTISADKSISTAYLQWSSLKASDTAMYYCARQTGFLWSSDLWGRGTLVTVSS

SEQ ID NO: 266 - DNA, 322 bp, Artificial Sequence
  synthetic
dgccatccagttgacccagtctccatcctccctgtctgcatctgtaggagacagagtcaccatcacttgccgggcaagtcaggacattagcagtgctttagcctggtatcaacagaaaccagggaaagctcctaagctcctgatctatgatgcctccagtttggaaagtggggtcccatcaaggttcagcggctatggatctgggacagatttcactctcaccatcaacagcctgcagcctgaagattttgcaacttattactgtcaacagtttaatagttacccgctcactttcggcggagggaccaaggtggagatcaaa

SEQ ID NO: 267 - protein, 108 aa, Artificial Sequence
  synthetic
PAIQLTQSPSSLSASVGDRVTITCRASQDISSALAWYQQKPGKAPKLLIYDASSLESGVPSRFSGYGSGTDFTLTINSLQPEDFATYYCQQFNSYPLTFGGGTKVEIK

SEQ ID NO: 268 - protein, 6 aa, Artificial Sequence
  synthetic
PSNWIG

SEQ ID NO: 269 - protein, 17 aa, Artificial Sequence
  synthetic
PIIYPGDSDTRYSPSFQ

SEQ ID NO: 270 - protein, 11 aa, Artificial Sequence
  synthetic
PQTGFLWSSDL

SEQ ID NO: 271 - protein, 12 aa, Artificial Sequence
  synthetic
PRASQDISSALA

SEQ ID NO: 272 - protein, 8 aa, Artificial Sequence
  synthetic
PDASSLES

SEQ ID NO: 273 - protein, 10 aa, Artificial Sequence
  synthetic
PQQFNSYPLT

SEQ ID NO: 274 - DNA, 382 bp, Artificial Sequence
  synthetic
dgaggtgcagctggtggagtctgggggaggcttggtccagcctggggggtccctgagactctcctgtgcagcctccggattcacctttagtaactatttgatgaactgggtccgccaggctccagggaaggggctggagtggctggccaacatacaggaagatggaattgagaaatactatgtggactctgtgaagggccgattcaccatctccagagacaacgccaagaactcactgtatctgcaaatgaacagcctgagagccgaggacacggctgtgtattactgtgcgagagagccctcccattacgatattttgactggttatgactactattacggtatggacgtctggggccaagggaccacggtcaccgtctcc

SEQ ID NO: 275 - protein, 128 aa, Artificial Sequence
  synthetic
PEVQLVESGGGLVQPGGSLRLSCAASGFTFSNYLMNWVRQAPGKGLEWLANIQEDGIEKYYVDSVKGRFTISRDNAKNSLYLQMNSLRAEDTAVYYCAREPSHYDILTGYDYYYGMDVWGQGTTVTVS

SEQ ID NO: 276 - DNA, 322 bp, Artificial Sequence
  synthetic
dgacatccagatgacccagtctccatcctccctgtctgcatctgtaggagacagagtcaccatcacttgccgggcaagtcagggcattagaaatgatttaggctggtatcagcagaaaccagggaaagcccctaagcgcctgatctatgctgcatccagtttgcaaagtggggtcccatcaaggttcagcggcagtggatctgggacagaattcattctcacagtcagcagcctgcagcctgaagactttgcaacttattactgtctacagtataatagtaacccattcactttcggccctgggaccaaagtggatatcaaa

SEQ ID NO: 277 - protein, 108 aa, Artificial Sequence
  synthetic
PDIQMTQSPSSLSASVGDRVTITCRASQGIRNDLGWYQQKPGKAPKRLIYAASSLQSGVPSRFSGSGSGTEFILTVSSLQPEDFATYYCLQYNSNPFTFGPGTKVDIK

SEQ ID NO: 278 - protein, 9 aa, Artificial Sequence
  synthetic
PGFTFSNYL

SEQ ID NO: 279 - protein, 9 aa, Artificial Sequence
  synthetic
PIQEDGIEK

SEQ ID NO: 280 - protein, 22 aa, Artificial Sequence
  synthetic
PAREPSHYDILTGYDYYYGMDV

SEQ ID NO: 281 - protein, 7 aa, Artificial Sequence
  synthetic
PQGIRND

SEQ ID NO: 282 - protein, 4 aa, Artificial Sequence
  synthetic
PAAS

SEQ ID NO: 283 - protein, 10 aa, Artificial Sequence
  synthetic
PLQYNSNPFT

SEQ ID NO: 284 - DNA, 376 bp, Artificial Sequence
  synthetic
dcaggtccagttggtacagtctggggctgacgtgaagaagcctggggcctcagtgaaggtctcctgcaaggtttccggacatatcctcactgatttatccatgcactgggtgcgacagcctcctggaaaaggacttgagtggatggcaggttttgatcctgaagaaggtaaaataatctacgcacagaagttccagggcagagtcaccatgaccgaggacacatctacagacacagcctacatggagctgagcagcctgagatctggggacacggccgtttattactgtgcaacaagcgatattttgactgggtattatagagactactacggtttggacgtctggggccaagggaccacgctcaccgtctcctca

SEQ ID NO: 285 - protein, 126 aa, Artificial Sequence
  synthetic
PQVQLVQSGADVKKPGASVKVSCKVSGHILTDLSMHWVRQPPGKGLEWMAGFDPEEGKIIYAQKFQGRVTMTEDTSTDTAYMELSSLRSGDTAVYYCATSDILTGYYRDYYGLDVWGQGTTLTVSS

SEQ ID NO: 286 - DNA, 337 bp, Artificial Sequence
  synthetic
dgatattgtgatgactcagtctccactcttcctgcccgtcacccctggagagccggcctccatctcctgcaggtctagtcagagcctcctgcatagtaaaggatacaactatttggattggtacctgcagaagccagggcagtctccacaactcctgatctatttgggttctaatcgggcctccggggtccctgacaggttcagtggcagtggatcaggcacagattttacactgaaaatcagcagagtggaggctgaagatgttggggtttattactgcatgcaaactctacaaactcctcggacgttcggccaagggaccaaggtggaaatcaaa

SEQ ID NO: 287 - protein, 113 aa, Artificial Sequence
  synthetic
PDIVMTQSPLFLPVTPGEPASISCRSSQSLLHSKGYNYLDWYLQKPGQSPQLLIYLGSNRASGVPDRFSGSGSGTDFTLKISRVEAEDVGVYYCMQTLQTPRTFGQGTKVEIK

SEQ ID NO: 288 - protein, 9 aa, Artificial Sequence
  synthetic
PGHILTDLS

SEQ ID NO: 289 - protein, 9 aa, Artificial Sequence
  synthetic
PFDPEEGKI

SEQ ID NO: 290 - protein, 19 aa, Artificial Sequence
  synthetic
PATSDILTGYYRDYYGLDV

SEQ ID NO: 291 - protein, 12 aa, Artificial Sequence
  synthetic
PQSLLHSKGYNY

SEQ ID NO: 292 - protein, 4 aa, Artificial Sequence
  synthetic
PLGS

SEQ ID NO: 293 - protein, 10 aa, Artificial Sequence
  synthetic
PMQTLQTPRT

SEQ ID NO: 294 - DNA, 352 bp, Artificial Sequence
  synthetic
dgaggtgcagctggtgcagtctggagcagaggtgaaaaagcccggggagtctctgaagatctcctgtaagggttctggatacatctttaccaactactggatcgcctgggtgcgccagatgcccggtaaaggcctggagtcgatggggatcatctatcctggtgactctgatatcagatacagcccgtccttccaaggccaggtcaccatctcagccgacaagtccatcaccaccgcctacctgcagtggagcagtctgaaggcctcagacaccgccatgtattactgtgcgagacatgacatagaggggtttgactactggggccggggaaccctggtcaccgtctcctca

SEQ ID NO: 295 - protein, 118 aa, Artificial Sequence
  synthetic
PEVQLVQSGAEVKKPGESLKISCKGSGYIFTNYWIAWVRQMPGKGLESMGIIYPGDSDIRYSPSFQGQVTISADKSITTAYLQWSSLKASDTAMYYCARHDIEGFDYWGRGTLVTVSS

SEQ ID NO: 296 - DNA, 325 bp, Artificial Sequence
  synthetic
dgaaattgtgttgacgcagtctccaggcaccctgtctttgtctccaggggaaagagccaccctctcctgcagggccagtcagagtgttagcagcagcttcttcgcctggtaccagcagaaacctggccaggctcccaggctcctcatctatggtgcatccagcagggccactggcatcccagacaggttaagtggcagtgggtctgggacagacttcactctcaccatcaccagactggagcctgaagattttgcagtgtattactgtcagcagtatgatagctcagcgatcaccttcggccaagggacacgactggagattaaa

SEQ ID NO: 297 - protein, 109 aa, Artificial Sequence
  synthetic
PEIVLTQSPGTLSLSPGERATLSCRASQSVSSSFFAWYQQKPGQAPRLLIYGASSRATGIPDRLSGSGSGTDFTLTITRLEPEDFAVYYCQQYDSSAITFGQGTRLEIK

SEQ ID NO: 298 - protein, 6 aa, Artificial Sequence
  synthetic
PNYWIA

SEQ ID NO: 299 - protein, 18 aa, Artificial Sequence
  synthetic
PIIYPGDSDIRYSPSFQG

SEQ ID NO: 300 - protein, 9 aa, Artificial Sequence
  synthetic
PHDIEGFDY

SEQ ID NO: 301 - protein, 13 aa, Artificial Sequence
  synthetic
PRASQSVSSSFFA

SEQ ID NO: 302 - protein, 8 aa, Artificial Sequence
  synthetic
PGASSRAT

SEQ ID NO: 303 - protein, 10 aa, Artificial Sequence
  synthetic
PQQYDSSAIT

SEQ ID NO: 304 - DNA, 355 bp, Artificial Sequence
  synthetic
dcaggtgcagctacagcagtggggcgcaggactgttgaagccttctgagaccctgtccctcacctgcgctgtctatggtgggtccttcagtggttatttctggagctggatccgccagcccccagggaaggggctggagtggattggggaaatcgatcacagtggaaagaccaactacaatccgtccctcaagagtcgagttaccatatcagtagacacgtccaagaaccaggtctccctgaagctgagctctgtgaccgccgcggacacggctgtgtattactgtgcgagagaaagcaagtactacttcggtttggacgtctggggccaagggaccacggtcaccgtcacctca

SEQ ID NO: 305 - protein, 119 aa, Artificial Sequence
  synthetic
PQVQLQQWGAGLLKPSETLSLTCAVYGGSFSGYFWSWIRQPPGKGLEWIGEIDHSGKTNYNPSLKSRVTISVDTSKNQVSLKLSSVTAADTAVYYCARESKYYFGLDVWGQGTTVTVTS

SEQ ID NO: 306 - DNA, 319 bp, Artificial Sequence
  synthetic
dgccatccagttgacccagtctccatcctccctgtctgcatctgtaggagacagagtcaccatcacttgccgggcaagtcagggcatttacagtgttttagcctggtatcagcagaaaccagggaaaactcctaagctcctgatctatgatgcctcccgtttggaaagtggggtcccatcaaggttcagcggcagtggatctgggacagatttcactctcaccatcagcagcctgcagcctgaagattttgcaacttattactgtcaacagtttaatagttacatcaccttcggccaagggacacgactggagattaaa

SEQ ID NO: 307 - protein, 107 aa, Artificial Sequence
  synthetic
PAIQLTQSPSSLSASVGDRVTITCRASQGIYSVLAWYQQKPGKTPKLLIYDASRLESGVPSRFSGSGSGTDFTLTISSLQPEDFATYYCQQFNSYITFGQGTRLEIK

SEQ ID NO: 308 - protein, 6 aa, Artificial Sequence
  synthetic
PGYFWS

SEQ ID NO: 309 - protein, 17 aa, Artificial Sequence
  synthetic
PEIDHSGKTNYNPSLKS

SEQ ID NO: 310 - protein, 11 aa, Artificial Sequence
  synthetic
PESKYYFGLDV

SEQ ID NO: 311 - protein, 12 aa, Artificial Sequence
  synthetic
PRASQGIYSVLA

SEQ ID NO: 312 - protein, 8 aa, Artificial Sequence
  synthetic
PDASRLES

SEQ ID NO: 313 - protein, 9 aa, Artificial Sequence
  synthetic
PQQFNSYIT

SEQ ID NO: 314 - protein, 125 aa, Artificial Sequence
  synthetic
PEVQLVESGGGLEQPGGSLRLSCAGSGFTFRDYAMTWVRQAPGKGLEWVSSISGSGGNTYYADSVKGRFTISRDNSKNTLYLQMNSLRAEDTAVYYCAKDRLSITIRPRYYGLDVWGQGTTVTVS

SEQ ID NO: 315 - protein, 113 aa, Artificial Sequence
  synthetic
PDIVMTQSPLSLPVTPGEPASISCRSSQSLLYSIGYNYLDWYLQKSGQSPQLLIYLGSNRASGVPDRFSGSGSGTDFTLKISRVEAEDVGFYYCMQALQTPYTFGQGTKLEIK

SEQ ID NO: 316 - protein, 9 aa, Artificial Sequence
  synthetic
PGFTFRDYA

SEQ ID NO: 317 - protein, 9 aa, Artificial Sequence
  synthetic
PISGSGGNT

SEQ ID NO: 318 - protein, 17 aa, Artificial Sequence
  synthetic
PAKDRLSITIRPRYYGL

SEQ ID NO: 319 - protein, 12 aa, Artificial Sequence
  synthetic
PQSLLYSIGYNY

SEQ ID NO: 320 - protein, 4 aa, Artificial Sequence
  synthetic
PLGS

SEQ ID NO: 321 - protein, 10 aa, Artificial Sequence
  synthetic
PMQALQTPYT

SEQ ID NO: 322 - protein, 118 aa, Artificial Sequence
  synthetic
PQVQLVESGGGVVQPGRSLRLSCAASGFTFRSYGMHWVRQAPGKGLEWVAVISYDGSNKYYIDSVKGRFTISRDNSKNTLNLQMNSLRLEDTAVYYCAKEGRGGFDYWGQGTLVTVSS

SEQ ID NO: 323 - protein, 108 aa, Artificial Sequence
  synthetic
PDIQMTQSPSSLSASVGDRVTITCRASQVINNYLAWFQQKPGKVPKSLIHAASSLQSGVPSKFSGSGSGTDFTLTISSLQPEDFATYYCQQYNSHPWTFGQGTKVEIK

SEQ ID NO: 324 - protein, 9 aa, Artificial Sequence
  synthetic
PGFTFRSYG

SEQ ID NO: 325 - protein, 9 aa, Artificial Sequence
  synthetic
PISYDGSNK

SEQ ID NO: 326 - protein, 11 aa, Artificial Sequence
  synthetic
PAKEGRGGFDY

SEQ ID NO: 327 - protein, 7 aa, Artificial Sequence
  synthetic
PQVINNY

SEQ ID NO: 328 - protein, 4 aa, Artificial Sequence
  synthetic
PAAS

SEQ ID NO: 329 - protein, 10 aa, Artificial Sequence
  synthetic
PQQYNSHPWT

SEQ ID NO: 330 - protein, 114 aa, Homo sapiens
PMAQVQLVQSGAEVKKPGSSVKVSCKASGQTFTGYYMHWVRQAPGQGLEWMGRIIPILGIANYAQKFQGRVTITADKSTSTAYMELSSLRSEDTAVYYCARGGDLGGMDVWGQG

SEQ ID NO: 331 - DNA, 341 bp, Homo sapiens
datggcccaggtccagctggtgcagtctggggctgaggtgaagaagcctgggtcctcggtgaaggtctcctgcaaggcttctggatcgaccttcaccggctactatatgcactgggtgcgacaggcccctggacaagggcttgagtggatgggaaggatcatccctatccttggtatagcaaactacgcacagaagttccagggcagagtcacgattaccgcggacaaatccacgagcacagcctacatggagctgagcagcctgagatctgaggacacggccgtgtactactgtgcgagaggaggagatctgggcggtatggacgtctggggccaaggga

SEQ ID NO: 332 - protein, 125 aa, Homo sapiens
PQVQLVEFGPGLVKPSETLSLTCTVSGGSISSYYWSWIRQPPGKGLEWIGYIYYSGSTNYNPSLKSRVAISVDTSKNQFSLKLSSVTAADTAVYYCAREYYYDSSGYYFYAFDIWGQGTTVTVSS

SEQ ID NO: 333 - DNA, 373 bp, Homo sapiens
dcaggtgcagctggtggagtttggcccaggactggtgaagccttcggagaccctgtccctcacctgcactgtctctggtggctccatcagtagttactactggagctggatccggcagcccccagggaagggactggagtggattgggtatatctattacagtgggagcaccaactacaacccctccctcaagagtcgagtcgccatatcagtagacacgtccaagaaccagttctccctgaagctgagctctgtgaccgccgcggacacggccgtgtattactgtgcgagagagtattactatgatagtagtggttattacttttatgcttttgatatctggggccaagggaccacggtcaccgtctcaagc

SEQ ID NO: 334 - protein, 920 aa, Homo sapiens
PMLTLQTWVVQALFIFLTTESTGELLDPCGYISPESPVVQLHSNFTAVCVLKEKCMDYFHVNANYIVWKTNHFTIPKEQYTIINRTASSVTFTDIASLNIQLTCNILTFGQLEQNVYGITIISGLPPEKPKNLSCIVNEGKKMRCEWDGGRETHLETNFTLKSEWATHKFADCKAKRDTPTSCTVDYSTVYFVNIEVWVEAENALGKVTSDHINFDPVYKVKPNPPHNLSVINSEELSSILKLTWTNPSIKSVIILKYNIQYRTKDASTWSQIPPEDTASTRSSFTVQDLKPFTEYVFRIRCMKEDGKGYWSDWSEEASGITYEDRPSKAPSFWYKIDPSHTQGYRTVQLVWKTLPPFEANGKILDYEVTLTRWKSHLQNYTVNATKLTVNLTNDRYLATLTVRNLVGKSDAAVLTIPACDFQATHPVMDLKAFPKDNMLWVEWTTPRESVKKYILEWCVLSDKAPCITDWQQEDGTVHRTYLRGNLAESKCYLITVTPVYADGPGSPESIKAYLKQAPPSKGPTVRTKKVGKNEAVLEWDQLPVDVQNGFIRNYTIFYRTIIGNETAVNVDSSHTEYTLSSLTSDTLYMVRMAAYTDEGGKDGPEFTFTTPKFAQGEIEAIVVPVCLAFLLTTLLGVLFCFNKRDLIKKHIWPNVPDPSKSHIAQWSPHTPPRHNFNSKDQMYSDGNFTDVSVVEIEANDKKPFPEDLKSLDLFKKEKINTEGHSSGIGGSSCMSSSRPSISSSDENESSQNTSSTVQYSTVVHSGYRHQVPSVQVFSRSESTQPLLDSEERPEDLQLVDHVDGGDGILPRQQYFKQNCSQHESSPDISHFERSKQVSSVNEEDFVRLKQQISDHISQSCGSGQMKMFQEVSAADAFGPGTEGQVERFETVGMEAATDEGMPKSYLPQTVRQGGYMPQA

SEQ ID NO: 335 - DNA, 3076 bp, Homo sapiens
dgagcagccaaaaggcccgcggagtcgcgctgggccgccccggcgcagctgaaccgggggccgcgcctgccaggccgacgggtctggcccagcctggcgccaaggggttcgtgcgctgtggagacgcggagggtcgaggcggcgcggcctgagtgaaacccaatggaaaaagcatgacatttagaagtagaagacttagcttcaaatccctactccttcacttactaattttgtgatttgggcaagatgttgacgttgcagacttgggtagtgcaagccttgtttattttcctcaccactgaatctacaggtgaacttctagatccatgtggttatatcagtcctgaatctccagttgtacaacttcattctaatttcactgcagtttgtgtgctaaaggaaaaatgtatggattattttcatgtaaatgctaattacattgtctggaaaacaaaccattttactattcctaaggagcaatatactatcataaacagaacagcatccagtgtcacctttacagatatagcttcattaaatattcagctcacttgcaacattcttacattcggacagcttgaacagaatgtttatggaatcacaataatttcaggcttgcctccagaaaaacctaaaaatttgagttgcattgtgaacgaggggaagaaaatgaggtgtgagtgggatggtggaagggaaacacacttggagacaaacttcactttaaaatctgaatgggcaacacacaagtttgctgattgcaaagcaaaacgtgacacccccacctcatgcactgttgattattctactgtgtattttgtcaacattgaagtctgggtagaagcagagaatgcccttgggaaggttacatcagatcatatcaattttgatcctgtatataaagtgaagcccaatccgccacataatttatcagtgatcaactcagaggaactgtctagtatcttaaaattgacatggaccaacccaagtattaagagtgttataatactaaaatataacattcaatataggaccaaagatgcctcaacttggagccagattcctcctgaagacacagcatccacccgatcttcattcactgtccaagaccttaaaccttttacagaatatgtgtttaggattcgctgtatgaaggaagatggtaagggatactggagtgactggagtgaagaagcaagtgggatcacctatgaagatagaccatctaaagcaccaagtttctggtataaaatagatccatcccatactcaaggctacagaactgtacaactcgtgtggaagacattgcctccttttgaagccaatggaaaaatcttggattatgaagtgactctcacaagatggaaatcacatttacaaaattacacagttaatgccacaaaactgacagtaaatctcacaaatgatcgctatctagcaaccctaacagtaagaaatcttgttggcaaatcagatgcagctgttttaactatccctgcctgtgactttcaagctactcaccctgtaatggatcttaaagcattccccaaagataacatgctttgggtggaatggactactccaagggaatctgtaaagaaatatatacttgagtggtgtgtgttatcagataaagcaccctgtatcacagactggcaacaagaagatggtaccgtgcatcgcacctatttaagagggaacttagcagagagcaaatgctatttgataacagttactccagtatatgctgatggaccaggaagccctgaatccataaaggcataccttaaacaagctccaccttccaaaggacctactgttcggacaaaaaaagtagggaaaaacgaagctgtcttagagtgggaccaacttcctgttgatgttcagaatggatttatcagaaattatactatattttatagaaccatcattggaaatgaaactgctgtgaatgtggattcttcccacacagaatatacattgtcctctttgactagtgacacattgtacatggtacgaatggcagcatacacagatgaaggtgggaaggatggtccagaattcacttttactaccccaaagtttgctcaaggagaaattgaagccatagtcgtgcctgtttgcttagcattcctattgacaactcttctgggagtgctgttctgctttaataagcgagacctaattaaaaaacacatctggcctaatgttccagatccttcaaagagtcatattgcccagtggtcacctcacactcctccaaggcacaattttaattcaaaagatcaaatgtattcagatggcaatttcactgatgtaagtgttgtggaaatagaagcaaatgacaaaaagccttttccagaagatctgaaatcattggacctgttcaaaaaggaaaaaattaatactgaaggacacagcagtggtattggggggtcttcatgcatgtcatcttctaggccaagcatttctagcagtgatgaaaatgaatcttcacaaaacacttcgagcactgtccagtattctaccgtggtacacagtggctacagacaccaagttccgtcagtccaagtcttctcaagatccgagtctacccagcccttgttagattcagaggagcggccagaagatctacaattagtagatcatgtagatggcggtgatggtattttgcccaggcaacagtacttcaaacagaactgcagtcagcatgaatccagtccagatatttcacattttgaaaggtcaaagcaagtttcatcagtcaatgaggaagattttgttagacttaaacagcagatttcagatcatatttcacaatcctgtggatctgggcaaatgaaaatgtttcaggaagtttctgcagcagatgcttttggtccaggtactgagggacaagtagaaagatttgaaacagttggcatggaggctgcgactgatgaaggcatgcctaaaagttacttaccacagactgtacggcaaggcggctacatgcctcagtgaaggactagtagttcctgctacaacttcagcagtacctataaagtaaagctaaaatgattttatctgtgaattc

SEQ ID NO: 336 - protein, 918 aa, Mus musculus
PMSAPRIWLAQALLFFLTTESIGQLLEPCGYIYPEFPVVQRGSNFTAICVLKEACLQHYYVNASYIVWKTNHAAVPREQVTVINRTTSSVTFTDVVLPSVQLTCNILSFGQIEQNVYGVTMLSGFPPDKPTNLTCIVNEGKNMLCQWDPGRETYLETNYTLKSEWATEKFPDCQSKHGTSCMVSYMPTYYVNIEVWVEAENALGKVSSESINFDPVDKVKPTPPYNLSVTNSEELSSILKLSWVSSGLGGLLDLKSDIQYRTKDASTWIQVPLEDTMSPRTSFTVQDLKPFTEYVFRIRSIKDSGKGYWSDWSEEASGTTYEDRPSRPPSFWYKTNPSHGQEYRSVRLIWKALPLSEANGKILDYEVILTQSKSVSQTYTVTGTELTVNLTNDRYVASLAARNKVGKSAAAVLTIPSPHVTAAYSVVNLKAFPKDNLLWVEWTPPPKPVSKYILEWCVLSENAPCVEDWQQEDATVNRTHLRGRLLESKCYQITVTPVFATGPGGSESLKAYLKQAAPARGPTVRTKKVGKNEAVLAWDQIPVDDQNGFIRNYSISYRTSVGKEMVVHVDSSHTEYTLSSLSSDTLYMVRMAAYTDEGGKDGPEFTFTTPKFAQGEIEAIVVPVCLAFLLTTLLGVLFCFNKRDLIKKHIWPNVPDPSKSHIAQWSPHTPPRHNFNSKDQMYSDGNFTDVSVVEIEANNKKPCPDDLKSVDLFKKEKVSTEGHSSGIGGSSCMSSSRPSISSNEENESAQSTASTVEYSTVVHSGYRHQVPSVQVFSRSESTQPLLDSEERPEDLQLVDSVDGGDEILPRQPYFKQNCSQPEACPEISHFERSNQVLSGNEEDFVRLKQQQVSDHISQPYGSEQRRLFQEGSTADALGTGADGQMERFESVGMETTIDEEIPKSYLPQTVRQGGYMPQ

SEQ ID NO: 337 - DNA, 2996 bp, Mus musculus
dgaattccggacatctagaggcagcgaacttgtttccgattcatgctttatcatttcttaatttcgtatgttgggaacatccctgcaagatgtcagcaccaaggatttggctagcgcaagctttgctttttttcctcaccactgaatctataggtcaacttttggaaccgtgtggttacatctaccctgaatttccagttgtccagcgcggctcgaacttcactgccatttgtgtgctgaaggaggcgtgtctgcagcattactacgtgaatgccagctacatcgtgtggaagaccaaccatgctgctgttcccagggagcaggtcactgtcatcaacagaaccacgtccagtgtcacgttcacagacgtggtcctcccgagcgtgcagctcacctgcaacatcctgtcctttgggcagatcgagcagaatgtgtatggagtcaccatgctttcaggctttcctccagataaacctacaaatttgacttgcattgtgaatgaggggaagaatatgctgtgccagtgggaccccggaagggagacttaccttgaaacaaactacactttgaaatcagagtgggcaacagagaagtttcctgattgccagtcaaagcatggcacttcatgtatggtcagctacatgcccacctattatgtcaacattgaagtctgggtggaagcagagaatgcccttgggaaggtctcctcagagtctatcaattttgaccccgtggataaagtgaaacccaccccaccatataatttatcagtgaccaactcagaagaattatccagtatattaaagctatcatgggtcagttcagggctgggcggtcttttagatctaaagtctgacatccaatataggaccaaagatgcctcaacttggatccaggtccctcttgaagatacaatgtctcctcgaacttccttcactgtgcaggacctcaagccttttacagaatatgtgtttaggatccggtccattaaggacagtgggaagggctactggagtgactggagtgaggaggctagtgggaccacatacgaagacagaccatccagaccaccaagtttctggtataagacaaatccatcccatgggcaggaatatagatctgtacggctcatatggaaggcactgcctctttctgaagccaatgggaaaatcttggattatgaagtgattcttacgcagtcaaagtccgtctcacaaacgtacacagtcactggcacagagctgaccgtgaatctcaccaatgaccgctatgtcgcgtctctagcagcaagaaacaaggtgggcaaatcagctgcagctgtcctcaccatccccagcccccacgtcacagctgcttattctgtagtgaatcttaaagcatttccaaaagataacctgctctgggtggaatggacacctccacctaaacccgtgagcaagtacatcttagagtggtgtgtgttgtcagagaacgcaccctgtgttgaagactggcagcaggaagacgctaccgtgaatcggacccacttgagaggacgcctcctggagagcaagtgctatcaaatcacagtaactcccgtattcgccacggggcccggaggctctgagtccttgaaggcgtacctcaaacaagccgctcctgccagaggaccgactgttcggacaaagaaagtggggaaaaatgaagctgtcttagcgtgggaccagattcctgtggacgaccagaatggcttcattagaaactactccatatcttacagaaccagcgtgggaaaggagatggttgtgcatgtggattcttctcacacggagtacacgctgtcctctctgagtagtgatacgttgtacatggtccgaatggccgcgtacacagatgaaggtgggaaagatgggccggaattcacttttacaacaccaaagttcgctcaaggagaaatagaagccatagtcgtgcctgtgtgcttagccttcctcctgacaaccctgctgggcgtcttgttctgctttaacaaacgagacctaattaaaaaacacatctggcctaatgttcctgatccttccaagagtcatattgcccagtggtcacctcacacccccccaaggcacaattttaactccaaagatcaaatgtactcggacggcaatttcactgatgtaagcgttgtggaaatagaagcaaacaacaagaagccttgtccagatgacctgaagtccgtggacctgttcaagaaggagaaagtgagtacagaagggcacagcagtggcatcgggggctcttcatgcatgtcctcctccaggcccagcatctccagcaacgaggagaatgagtctgctcagagcaccgccagcacggtcgagtactccactgtggtgcacagcggctacaggcaccaggtcccgtccgtgcaagtgttctcaaggtccgagtccacccagcccctgctagactcggaggagcggccagaagacctgcagctggtggatagtgtagacggtggggatgagatcttgcccaggcaaccgtatttcaagcagaactgcagtcagcctgaagcctgtccagagatttcacattttgaaaggtcaaaccaggttttgtccggcaatgaggaggattttgtcagactgaagcagcagcaggtttcagatcacatttctcagccctatggatccgagcaacggaggctgtttcaggaaggctctacagcggatgctcttggcacgggggctgatggacagatggagagatttgaatctgttggaatggagaccacaattgatgaagaaattcccaaaagttacttgccacagactgtaagacaaggtggctacatgccgcagtgaaggactggctcctgaacttcagcaggaactgcaaaataaagctaaagacgagtggcttcagatgagaaacagtcctcactccctgaagataggcattgcctctaaggacaaagtcacacctgggccgtctccattccagagtagctggaattc

SEQ ID NO: 338 - protein, 919 aa, Rattus novergicus
PMSALRIWLMQALLIFLTTESIGQLVEPCGYIYPEFPVVQRGSNFTATCVLKEKCLQVYSVNATYIVWKTNHVAVPKEQVTVINRTASSVTFTDVVFQNVQLTCNILSFGQIEQNVYGITILSGYPPDIPTNLSCIVNEGKNMLCQWDPGRETYLETNYTLKSEWATEKFPDCRTKHGTSSCMMGYTPIYFVNIEVWVEAENALGNVSSEPINFDPVDKVKPSPPHNLSVTNSEELSSILKLAWVNSGLDSILRLKSDIQYRTKDASTWIQVPLEDTVSPRTSFTVQDLKPFTEYVFRIRSIKENGKGYWSDWSEEASGTTYEDRPSKAPSFWYKVNANHPQEYRSARLIWKTLPLSEANGKILDYEVVLTQSKSVSQTYTVNGTELIVNLTNNRYVASLAARNVVGKSPATVLTIPGSHFKASHPVVDLKAFPKDNLLWVEWTPPSKPVNKYILEWCVLSENSPCIPDWQQEDGTVNRTHLRGSLLESKCYLITVTPVFPGGPGSPESMKAYLKQAAPSKGPTVRTKKVGKNEAVLEWDHLPVDVQNGFIRNYSISYRTSVGKEMVVRVDSSHTEYTLSSLSSDTLYMVHMAAYTEEGGKDGPEFTFTTLKFAQGEIEAIVVPVCLAFLLTTLLGVLFCFNKRDLIKKHIWPNVPDPSKSHIAQWSPHTPPRHNFNSKDQMYSDANFTDVSVVEIEANNKKPCPDDLKSLDLFKKEKISTEGHSSGIGGSSCMSSSRPSISSSEENESAQSTASTVQYSTVVHSGYRHQVPSVQVFSRSESTQPLLDSEERPEDLQLVDSVDSGDEILPRQQYFKQSCSQPGASPDVSHFERSSQVPSGSEEDFVRLKQQQVSDHISEPYGSEQRRLFQEGSVADALGTGTDGQIERFESVGMETAMDEDISKSYLPQTVRQGGYMPQ

SEQ ID NO: 339 - DNA, 7455 bp, Rattus novergicus
dgagcatcccttgcaagatgtccgcactaaggatctggctaatgcaagctttgcttattttcctcactactgagtctataggtcaacttgtggaaccatgtggttatatctaccctgagtttccagttgtccagcgtggctctaacttcactgccacttgtgtgctaaaggagaagtgtctgcaggtgtactccgtgaatgccacttacatcgtgtggaagacaaaccatgttgccgttcctaaggagcaggtcacagtcatcaacagaacggcatccagtgtcacattcacagacgtggtctttcagaacgtccagctcacctgcaatatcctgtcatttggacagatcgagcagaatgtgtatggaatcaccatactttcaggctatcctccagatatacctacaaatttgagttgcattgtgaatgaggggaagaacatgctgtgtcagtgggacccaggaagggagacataccttgaaacaaactacactttgaagtcagagtgggcaacagagaagtttcctgattgtcgaacaaagcatggcacgagctcctgcatgatgggctatacccccatctattttgtcaacatcgaggtctgggtggaggccgagaatgcccttgggaatgtctcctcagagcctatcaattttgaccccgtggataaagtgaaacccagcccacctcataatttgtcagtgaccaactcagaagaattatccagtatattaaaactagcatgggtcaattcaggtttggacagtattttaaggctgaagtcggacatccaatataggaccaaagatgcctcaacttggattcaggtccctcttgaagatacagtgtctccccggacttcgttcactgttcaggatctcaagccttttacagaatatgtgtttaggattcggtccattaaggagaatgggaagggctactggagtgactggagtgaggaggcgagcgggaccacatatgaagacagaccatccaaagcgccaagtttctggtataaggtaaatgcaaaccatccacaggagtataggtctgcacggctcatatggaagacattgcccctttctgaagccaatgggaagatcttggattatgaagtggttcttacacagtccaagtcagtttcgcaaacttacacagttaacggcacagagttgatagtaaacctcaccaataaccgctatgtagcgtctctagcagcaagaaatgtggtcggcaagtcccctgcaaccgtcctcaccatccccggctcccacttcaaagcttctcaccccgtagtggatcttaaagcatttccaaaagataacctgctctgggtagaatggacaccgccatctaaacctgtgaacaaatacatactagagtggtgtgtgttgtcagagaactcaccctgcatcccagactggcagcaagaagatggcactgtgaatcggacccacttaagaggaagcctactggagagcaagtgctatctgatcacagtaaccccagtgtttcccggtgggcctggaagccctgagtccatgaaggcgtacctcaaacaagcagctccttctaaaggaccgactgttcggacaaagaaagtggggaaaaatgaagctgtcttagagtgggaccatcttcctgttgatgtccagaacggattcattagaaactactccatatcttatagaaccagtgttggaaaagaaatggttgtgcgtgtggattcttctcacacagaatacacactgtcctctttgagtagcgatacactgtacatggtccacatggcagcatacacagaagaaggtgggaaggatgggccggaattcacttttacaacactaaagtttgctcaaggagaaatcgaagccatagtcgtgcctgtgtgcttagctttcctcctgacaacgctgctgggagtcttgttctgctttaataaacgagacctaattaaaaaacacatctggccgaatgtcccagatccttcaaagagtcatattgcccagtggtcacctcacacccccccaaggcacaattttaactccaaagatcagatgtactcagatgccaatttcactgacgtaagcgttgtggaaatagaagcaaacaacaaaaagccttgtccagatgacctgaaatccttggacctgttcaagaaggagaaaataagtacagaagggcacagcagtggcattggggggtcctcgtgcatgtcctcttctaggcccagcatctccagcagtgaggagaacgagtctgctcagagcaccgcaagcacggtgcagtactccaccgtggtgcacagcggctacaggcaccaggtgccgtcagtgcaagtgttctcaaggtctgagtccacccagcccctgctagactccgaggagcggccagaggacctgcagctggtggatagtgtggacagcggtgacgagatcttacccaggcaacagtatttcaaacaaagctgcagtcagcctggagccagtccagatgtttcacacttcgaaaggtcaagccaggttccgtcaggcagtgaggaggattttgtcagactgaaacagcagcaggtttcagatcacatttcagagccctatggctccgagcaacggaggctgtttcaggaaggttctgtggcagatgctcttggcacagggactgatggacagatagagagattcgaatctgttggaatggagacagcgatggatgaagacatttccaaaagttacttgccacagactgtaagacaaggtggctacatgccacagtgagggaccggctcctgcgggacctcagcgggactgcgaagtaaagctaaaatgctcgtgacttcagatgggaaataatcttcagtccctgatgataaccattgcctttaaggacaaagtcacaactgggccatctccattccagagtatctgggattctccttcaagcactacatgaactgactttatcctctgaatagctggaggactctgcgctgtttcagaatgtttgcactgctgaaaactaagtgtgtctgagtttgtaaagcttttgttttgctccatagaaagtggggaatttaaatgagccgagccgagccatggcgtcgctcagctgtgctggtggtgagactgaccattcagatgccgggagcaaaggtctaaccctcctcagccagcagcttcatgtcagagttccccgggcagactgcccagattgtgtcacctatcaaaaaaaaaaaaaaaagagtggagggggcagggtggctcatttctgggtttgttattagagaatcttggcttgtttggtgccgttggtatcgatgcttccagttattactgaagaaaaggacgaactttcaagagaagcagcatagaagaacccattaccttatattcacctaaaacctcacagaaacctgcttattagtgataacatttttcaaagtcagtttcaccaacactctagtggaccgggctggcctcaaactcacagagatttgtctgcctcagcctccggagtactggggttaaaggcatgtaccaccaccaccacttgacttaaaaatttgctgtttttaaagacttaagttgctgacatttttctgaacgtatataaacacaccagggacagatgattccagatgttggtggaggaagcactttatccagaatgtcttcaactgtacattactttaattgactccaccttgtttttgtttttaagactagcaaggtgtttgctgaagggtggcattgcccagaggctcaggcgagtcccagagctcacgcaccgatgtctgtgaccaccaccgtggcagaagtcctcctacaaagctgacgaagccgtgagggttttgttagtttgctgggcggggattgagcccacagccttgtacatgctagacactaccactgagctcacctacacatctcactatgttatgtaggctcaagcgatcctcctgtctcagcttcctgagtgttgggacttcgggtgtgcgctgccacacacccgaccaggtagttttaatatctgccatttatgaggtagagttttacacaggatttaggactatcttaaacctgttccttaggttgctttgttaaggaatagcctggacatccggtgtttagcactaaagccattatgtatgcgcctaactttccagtgacatgtcctgggtgggcaggagttgactgagcgccattagtggttgattaccaccaagtgtgcgcacaggaaaaggattaaagtttcagaacatggcccttaatcattcatagccgctgccccacggtggctgaggaggagttgatgtgcactgagctggatgtggttttgccgttcactcagaggactgtttatactctacttgtgatgtgttatcgttatatttttatactaggtaatcctgttctgagtcctttcacgtgtataatcctcatgggactgtacgtgctttgctctggtattcagttgccttcttggcaaaaccagcctagaattgctaaaatgccaggattgaagttagatgatgaaagtcgggcacaggaaggccaggtcagggtcagagagaccagaattcacactacaaggctggcaccatcaccattcaagttgggcatggaagcctgggcccggcaggactgagctccctatgtatgtgtatctgccaggaaattaacacttgctaaatttcccatcctctcacagcgagcagtgtacctgtgcgctgctgtgaacgttgtagtgtgaagtctgtcctggggtagggagttaccagcgtgaggtcagggatgaacacagctcactgaagacgagcctggtggaagagagtttgccattgtgcccactgcatgaacattccctcgggggatgtatcatggagcacctctctttgctctaagaaagagtcttagaattcatcttaaatacagactttgctacagcatgtttaagaataatctggatgcacgtaacttgtattttaggtaggcagagaaactaatctggctgctttctgtaaaaccagtctaataaagctaattctatacatgttcttttcttctctcgtgtgtaaaactgtagtttaaggcaatcagaaaacaacctatcttgtggccaaaactagttcactgtagtttaaggcaatcagaaaacaacctatcttgtggccaaaactagttcactgcttctgatgcagttgcctgcttaggagtcatagacaaagaaggtttaatgtaatcaatattaccaaacagagttcccatcttttactcaccaaacaaagtcagtccttcgaaaagcataagtcagtactggcggacacagagaagccaaagtaggaaaagtgcaaccccatcctggttctcctgtctacagttcattcagcttctgcatagttcctgaactgtagggttttttgcttttcgggttttttttgttttgttttggggtttgtttgtttgttttgtttttggggattttgggggggtgtttttggttttttaagatagggtttctctgtgtggccttggctgtcctggatctgccagcctggtgtgccaccactgtctggtgagaccatagttcttactgtgaacttaaagggctgaagaggtagaagggcttatgggacggactgcagcttctaattttttctcaaccctactttaataatggttcttaaatgctttaaccttccttctagcccaccacccattaggggtagtggaaaagagaggatacaggtgaagtggacctgtttagaaatggttctttggagcaaatcctgtctgcactgtcaggaaatcagcagttcggttcactggtcagcagtggcagccccactcgagaacacacttcctggatgcaccagcagtccagttcagtagtgtcgggagagcagcagcggtggcccgacctagcaggagtggccaggcctcagcctcagcacaagtcagcagaaagaaccagaagttctcagctgtgcctctcagtgaaatgaaaatatccaagactgttgagtcctatatatactgcctccaaatatcatgtgtccgtgggtgtggtctccccacgtgtcttgcctcagtatgtgagtctgtatcagctgacatgactgccaatcgacccaggtcaaggaattcgcaagaagccaccagaacacacgttttttggtgtttctctttatggagtcctgacaaatggcgcacaatgatacatgtgaggcaaaccaatatgtgtgttattacaaagaatccttcatcatgtgtcctttcgaatgctttctgtagcaaaatatcctttcacctgtgtctgctttagcaaaacaccgtccaacacaactgactttccaaagaaccttaagtttccattccacaggacactgtcaaagccaggactgctaacgtcccattagacatcgcactgtttttaaagctgtcttctttttcctgcccacagaattagagctacagcattcctcagtgtttgtcatagacatgtattaaccaggtagaacaagccaggaggttttagactattaagtttactctcctgcttcatgttactgagtttcctttaaaagcaagcttttaacacaacttctggttagtagagattttcatgacatgagtagaatcagtgagctgcaaaaaaaagtgtaaaggtgaattgttaaaaataaccccttgggctagctctgctctaggcactgttgttacattacccaggtaagattacgttttaaaatgtgcctttctatgagttagaaaacacactatatggcaaactatataattaattcatagacaaagtcttctcaagccagatgtactatctctcaggttcatggtttgttctgtcacatgcaggttagcctatgctcactccggtaaagctaaaacggtgatggctgtaggtgttactcgctctaacttttttagggctttttgtcaccagtaagctcccacagactggtcagttttttgtttgttttttgtttgtttgttttaattagttgtcaacaccagtgagggggtcagcatgaaaacgcaccaggccggttgggtagagattcttagtcctgtgatcaccagcttagtctggtaaccacagactgcaaatgctgttacgtaactagaaacatgggacgtatcagaacaaggggatgctacacaggtgtttgtgtaatatacagtgcaccttgctgctagtgtgacagtaggcattccctgtggccccttatgcctttgctctcctgtactccacgtgagccctgttctctcaactctgccccacccacccatgcagcttcacatgggaagcttgcccgtgttagcgctgtagtaagttgcatgtgctgagtataaccaaagctatcatttttatgttgaccctgtcataaatgtcttactatatcagctctaatcctttttaaataaatttgagaaagaaact

SEQ ID NO: 340 - protein, 1098 aa, Homo sapiens
PMMDIYVCLKRPSWMVDNKRMRTASNFQWLLSTFILLYLMNQVNSQKKGAPHDLKCVTNNLQVWNCSWKAPSGTGRGTDYEVCIENRSRSCYQLEKTSIKIPALSHGDYEITINSLHDFGSSTSKFTLNEQNVSLIPDTPEILNLSADFSTSTLYLKWNDRGSVFPHRSNVIWEIKVLRKESMELVKLVTHNTTLNGKDTLHHWSWASDMPLECAIHFVEIRCYIDNLHFSGLEEWSDWSPVKNISWIPDSQTKVFPQDKVILVGSDITFCCVSQEKVLSALIGHTNCPLIHLDGENVAIKIRNISVSASSGTNVVFTTEDNIFGTVIFAGYPPDTPQQLNCETHDLKEIICSWNPGRVTALVGPRATSYTLVESFSGKYVRLKRAEAPTNESYQLLFQMLPNQEIYNFTLNAHNPLGRSQSTILVNITEKVYPHTPTSFKVKDINSTAVKLSWHLPGNFAKINFLCEIEIKKSNSVQEQRNVTIKGVENSSYLVALDKLNPYTLYTFRIRCSTETFWKWSKWSNKKQHLTTEASPSKGPDTWREWSSDGKNLIIYWKPLPINEANGKILSYNVSCSSDEETQSLSEIPDPQHKAEIRLDKNDYIISVVAKNSVGSSPPSKIASMEIPNDDLKIEQVVGMGKGILLTWHYDPNMTCDYVIKWCNSSRSEPCLMDWRKVPSNSTETVIESDEFRPGIRYNFFLYGCRNQGYQLLRSMIGYIEELAPIVAPNFTVEDTSADSILVKWEDIPVEELRGFLRGYLFYFGKGERDTSKMRVLESGRSDIKVKNITDISQKTLRIADLQGKTSYHLVLRAYTDGGVGPEKSMYVVTKENSVGLIIAILIPVAVAVIVGVVTSILCYRKREWIKETFYPDIPNPENCKALQFQKSVCEGSSALKTLEMNPCTPNNVEVLETRSAFPKIEDTEIISPVAERPEDRSDAEPENHVVVSYCPPIIEEEIPNPAADEAGGTAQVIYIDVQSMYQPQAKPEEEQENDPVGGAGYKPQMHLPINSTVEDIAAEEDLDKTAGYRPQANVNTWNLVSPDSPRSIDSNSEIVSFGSPCSINSRQFLIPPKDEDSPKSNGGGWSFTNFFQNKPND

SEQ ID NO: 341 - DNA, 10108 bp, Homo sapiens
daaatcctaaccctctctcccagaacgtgtctctgctgcaaggcaccgggccctttcgctctgcagaactgcacttgcaagaccattatcaactcctaatcccagctcagaaagggagcctctgcgactcattcatcgccctccaggactgactgcattgcacagatgatggatatttacgtatgtttgaaacgaccatcctggatggtggacaataaaagaatgaggactgcttcaaatttccagtggctgttatcaacatttattcttctatatctaatgaatcaagtaaatagccagaaaaagggggctcctcatgatttgaagtgtgtaactaacaatttgcaagtgtggaactgttcttggaaagcaccctctggaacaggccgtggtactgattatgaagtttgcattgaaaacaggtcccgttcttgttatcagttggagaaaaccagtattaaaattccagctctttcacatggtgattatgaaataacaataaattctctacatgattttggaagttctacaagtaaattcacactaaatgaacaaaacgtttccttaattccagatactccagagatcttgaatttgtctgctgatttctcaacctctacattatacctaaagtggaacgacaggggttcagtttttccacaccgctcaaatgttatctgggaaattaaagttctacgtaaagagagtatggagctcgtaaaattagtgacccacaacacaactctgaatggcaaagatacacttcatcactggagttgggcctcagatatgcccttggaatgtgccattcattttgtggaaattagatgctacattgacaatcttcatttttctggtctcgaagagtggagtgactggagccctgtgaagaacatttcttggatacctgattctcagactaaggtttttcctcaagataaagtgatacttgtaggctcagacataacattttgttgtgtgagtcaagaaaaagtgttatcagcactgattggccatacaaactgccccttgatccatcttgatggggaaaatgttgcaatcaagattcgtaatatttctgtttctgcaagtagtggaacaaatgtagtttttacaaccgaagataacatatttggaaccgttatttttgctggatatccaccagatactcctcaacaactgaattgtgagacacatgatttaaaagaaattatatgtagttggaatccaggaagggtgacagcgttggtgggcccacgtgctacaagctacactttagttgaaagtttttcaggaaaatatgttagacttaaaagagctgaagcacctacaaacgaaagctatcaattattatttcaaatgcttccaaatcaagaaatatataattttactttgaatgctcacaatccgctgggtcgatcacaatcaacaattttagttaatataactgaaaaagtttatccccatactcctacttcattcaaagtgaaggatattaattcaacagctgttaaactttcttggcatttaccaggcaactttgcaaagattaattttttatgtgaaattgaaattaagaaatctaattcagtacaagagcagcggaatgtcacaatcaaaggagtagaaaattcaagttatcttgttgctctggacaagttaaatccatacactctatatacttttcggattcgttgttctactgaaactttctggaaatggagcaaatggagcaataaaaaacaacatttaacaacagaagccagtccttcaaaggggcctgatacttggagagagtggagttctgatggaaaaaatttaataatctattggaagcctttacccattaatgaagctaatggaaaaatactttcctacaatgtatcgtgttcatcagatgaggaaacacagtccctttctgaaatccctgatcctcagcacaaagcagagatacgacttgataagaatgactacatcatcagcgtagtggctaaaaattctgtgggctcatcaccaccttccaaaatagcgagtatggaaattccaaatgatgatctcaaaatagaacaagttgttgggatgggaaaggggattctcctcacctggcattacgaccccaacatgacttgcgactacgtcattaagtggtgtaactcgtctcggtcggaaccatgccttatggactggagaaaagttccctcaaacagcactgaaactgtaatagaatctgatgagtttcgaccaggtataagatataattttttcctgtatggatgcagaaatcaaggatatcaattattacgctccatgattggatatatagaagaattggctcccattgttgcaccaaattttactgttgaggatacttctgcagattcgatattagtaaaatgggaagacattcctgtggaagaacttagaggctttttaagaggatatttgttttactttggaaaaggagaaagagacacatctaagatgagggttttagaatcaggtcgttctgacataaaagttaagaatattactgacatatcccagaagacactgagaattgctgatcttcaaggtaaaacaagttaccacctggtcttgcgagcctatacagatggtggagtgggcccggagaagagtatgtatgtggtgacaaaggaaaattctgtgggattaattattgccattctcatcccagtggcagtggctgtcattgttggagtggtgacaagtatcctttgctatcggaaacgagaatggattaaagaaaccttctaccctgatattccaaatccagaaaactgtaaagcattacagtttcaaaagagtgtctgtgagggaagcagtgctcttaaaacattggaaatgaatccttgtaccccaaataatgttgaggttctggaaactcgatcagcatttcctaaaatagaagatacagaaataatttccccagtagctgagcgtcctgaagatcgctctgatgcagagcctgaaaaccatgtggttgtgtcctattgtccacccatcattgaggaagaaataccaaacccagccgcagatgaagctggagggactgcacaggttatttacattgatgttcagtcgatgtatcagcctcaagcaaaaccagaagaagaacaagaaaatgaccctgtaggaggggcaggctataagccacagatgcacctccccattaattctactgtggaagatatagctgcagaagaggacttagataaaactgcgggttacagacctcaggccaatgtaaatacatggaatttagtgtctccagactctcctagatccatagacagcaacagtgagattgtctcatttggaagtccatgctccattaattcccgacaatttttgattcctcctaaagatgaagactctcctaaatctaatggaggagggtggtcctttacaaacttttttcagaacaaaccaaacgattaacagtgtcaccgtgtcacttcagtcagccatctcaataagctcttactgctagtgttgctacatcagcactgggcattcttggagggatcctgtgaagtattgttaggaggtgaacttcactacatgttaagttacactgaaagtgttcatgtgcttttaatgtagtctaaaagccaaagtatagtgactcagaatcctcaatccacaaaactcaagattgggagctctttgtgatcaagccaaagaattctcatgtactctaccttcaagaagcatttcaaggctaatacctacttgtacgtacatgtaaaacaaatcccgccgcaactgttttctgttctgttgtttgtggttttctcatgtgtatacttggtggaattgtaagtggatttgcaggccagggagaaaatgtccaagtaacaggtgaagtttatttgcctgacgtttactcctttctagatgaaaaccaagcacagattttaaaacttctaagattattctcctctatccacagcattcacaaaaattaatataatttttaatgtagtgacagcgatttagtgttttgtttgataaagtatgcttatttctgtgcctactgtataatggttatcaaacagttgtctcaggggtacaaactttgaaaacaagtgtgacactgaccagcccaaatcataatcatgttttcttgctgtgataggttttgcaagccttttcattattttttagcttttatgcttgcttccattatttcagttggttgccctaatatttaaaatttacacttctaagactagagacccacattttttaaaaatcattttattttgtgatacagtgacagctttatatgagcaaattcaatattattcataagcatgtaattccagtgacttactatgtgagatgactactaagcaatatctagcagcgttagctgtccatatagttctgattggatttcgttcctcctgaggagaccatgccgttgagcttggctacccaggcagtggtgatctttgacaccttctggtggatgttcctcccactcatgagtcttttcatcatgccacattatctgatccagtcctcacatttttaaatataaaactaaagagagaatgcttcttacaggaacagttacccaagggctgtttcttagtaactgtcataaactgatctgaatccatgggcatacctgtgttgcaggtgcagcaattgcttggtgagctgtgcagaattgattgccttcagcacagcatcctctgcccacccttgtttctcataagcgatgtctggagtgattgtggttcttggaaaagcagaaggaaaaactaaaaagtgtatcttgtattttccctgccctcaggttgcctatgtattttaccttttcatatttaaggcaaaagtacttgaaaattttaagtgtccgaataagatatgtcttttttgtttgttttttttggttgtttgtttgttttttatcatctgagattctgtaatgtatttgcaaataatggatcaattaattttttttgaagctcatattgtatctttttaaaaaccatgttgtggaaaaaagccagagtgacaagtgacaaaatctatttaggttctctgtgtatgaatcctgattttaactgctaggattcagctaaatttctgagctttatgatctgtggaaatttggaatgaaatgcaattcattttgtacatacatagtatattaaaactatataatagttcatagaaatgttcagtaatgaaaaatatatccaatcagagccatccctaaagagtgttctcttgtcttcctttgtatcctctttggctccttcccttagcttccaccccagacatcagacctggggctgccttctctccctgccaaagcttgctgttagcattgtctgcttgccctcaactcctgccttgttccctgttgaaatgtatcaatcccgtactttatctctccaggacaaggataagtgtggctacagtaaaagtttattgctctaaacggcgctaacctgagataatgagaaaaggccagaagagattgtttgatctctgtctgtcaatatatatgcatttcaactgtgaccatctggatccagggccctttctaacctatataacgactcatttgtttggttaatgatgaatatcactggggctcttaagtcctttcgttctatccaagacttcattgtttttttctgtatgaaaaaagtgcagaatatcactcacctttcccctacttttggatcccctacacgaggatcactagcttaatgagaagcagagtaacgctattaagtctgggcaagctccttataagttgctgtgtgcttaaaagaatgtgatttatgtctggggccaaagcagttttccttcttttccctcattgaattcaagacagctagacccttgtgtagatcccaggatattacctctactccccccaacctgtgtgtgtagggagagtaacaacacgggaagaggggagggaagttggaaggagattggtcacatgttcagttgtctgagatactggtaaatgtgcgctgtttgtcaatgaaggttgcatgcctgcatttacaaggtggtctcatactgattgtgctctgtccagttagattcgtggcttctcccttggaagctacaattaaggactagttagaagcagaggctagatgtgttctctccagcccttactaactgggaaaataattgagaaatccctcttttcctcagtgaaagcccagtcattggttagaaaaatctaattgtcaaactagcattatgttccatcatatctgtgggatagtaattcatgtaagacacatttttacctctcttacaagtcaattcacttacaagccagtttcaaatcaagcttcccttgcgaggaatggagatcattatggggcttattatgactacatttcttttatgagtgaccattttaaataattaatattttatttaatattaaattattaaagacttagctagacttttaacattagatgaaccttgtgaatcatatattgcatagattagcacatgtatgcaatctaggtcatcaatttgttgaatttatacagccctagatttgagattgtggccctgagtatctggatagttgagttgtgtgtttatgtgcttatatgatagaggtgctttgttcctgcagcttagaaacagaagcagccattcactgagaagcttaagagaggaagtatcaacctcattttccaaaccagcattactttcaccgctcgtggatctgaaagattacatttagaacatttagtactattacactctcagaaactgtggtaaaaagtcacattttcaaaacttcatgcatattgtattcttgttggaaataagtcctatagtttcttaattgtcttcatgccgtccatatttaacaaacattgcaagtcctttttatatttgggtaattatttgtaatttagtgaaggagactaggggatgttttcttccaaagggaatttaaaatcaattttatggtattttgaaagtaaaatactccttaacgtgtcaatatttttaaaatgttatctcgaagttttctattgctcaggtatataatctaataaaattttttgtttgctctaaggttatttttgctattctctattttgaattatgttaaaatttgtgtgcattttatgaaatgccttttttcttattttgaaagtgtaaaattgggcatctcagagtaaaatgtgggattattagctacaaagactaggcacatcgtgaaagctcagtaactaattttcttgactgagtcctatcccagagtgtcacagattcaacagaattttcctgaagggtgatacacaccaaaatctagcttgtgtggatctgagactattgactcaaagattcaaatctacttcggaagtgactccacggtttgagtgaaaactgaggaaggactcatgcctgtatatcactagatatcttatttctccataattttaagtgttcataatttcttcttctttgatgggtgtgcaactggggcatgtttgtaccagccagcatgtgttctgcccaacagtgtgtccgtgtgtgaggttaactgattcagaactcattctcttgataaactatttcttgaaagcatttattttaagtctttatttcctgctgaaatgaagtttcatgctgtcatgcccatcttatttattctagaagaaaattttcatagaagaaaatgatttatggccaaagttacagaacattcatcttttagacttagccttagaatatcattggaaattacttggcttgaatttggttcgtttttatctttatggattatgtaccagggctattaataatacttaaaccccttattttgctatggtggttagatttttttattccttttcaattagtgctattaattattacatggtcgtattcatgcttattacagatgaactatttttagtgccagtgtaaaggattaagaataacattcaattagttggctatttcaggctttattgtacatggtaatgtttcagggagtgtgatttggtctagaatatatccagatccttgtaattatgatattgggttatgacaggattctattatttttagctatgaatggtgcttatttttccctatattaggaatgttaatatttggattatcagagtccatgttataaacagaatttacctatgcaagacaaattctaactgtgcaacattttcatgagaattaaaagttgtgtgttaaggggaaaaccctctgaatgtttttatgtgtaagtgcctaaagaaccgtagaaacagtacatcaaaagctcttataaaagaaaaactgattgaacattagccagaaacaaaatatgatttacatttttttttttggttgctgggactgaataccctaaaaactaagagatgtgagtggggaaaatgtctaattgataagaaagttgatttatattatatttacatgcatcttctaagattgcctttacagtagccaatcagaactttaaaaaaaaaaaagctaacaacatagatcctatgtgttgcccttaagactaaaatactttgcacacgtgattgaatggctcacttaagttgttgaatttccttatacatttaaagtgtacttccgttaagaattattccattttaaatgggtaactttcagcttccgaactattttcctaaacattccagttgtgtattataaaagatcaaaatatctctaggtggtagtacaattttcatttataacgtggaaaagttaactgttaggtttaacattagtattagtgtttttgcaattgctcatagaaaagaacactgaataatggttttcatacaatttttgtaaaacattcttctcccagtttgattccaaatgcttttccccaaattgtctaatatatcataagctagtgtttccttgtatttaatttttccttccaacacaatatttaggaaaaatatgaataacattgtgagtagcgggagacaacacgaaaaagaaacctttcattgttgtggaggggtaggtgttatgtgattgatgcccttcctggcgtttgttttatcctgttattttctcaaaaaagagcacggctttttcttaaatacatttaaattcagaattgcttgcaaaagattggcctggatagatagacatcctagatttaagatagtaccatcttaaaagtatgttgaaaggtaaaataaatcatttcaaaatacttaactttcctaataaggatgttaggttttcttctctttcattagctggccataagtcaaggtccttataacactaggaaattacctttttttactttcaaaattgcattatagtgaattactgtttacaaaatacacatactgtgaacagatataagtttctgtcttttataaggtttgtagaatgaatgtttttttaaagtgagtattatatgttaaatattttaagttttttataaatactagtaactgtttactaatttttgtttggtcaaatgcttgtaaatgtagctgaaagaagatagggagaaactgcggatcccaaactgttccctttttcatttcttgaaatgttaccactacagacatttttttaaggtgaataaacagttgtgatgtgctgtacctaaaatcatgtttaatcgtataaggaaacatttcaatacacttatacaggaagaaaactatagatgaagtacatgtgtgtgattcagtctgattcacagaattctgagagtaatatggaataaaacaactccacttagatgataactgaagcatttcctgccttgtgaaaatttggattttaaattgctgttagaatgggaaatttggacactttatatcattgtataatttcagaatttagtttctgtatcttttggaaaacatgattatagcaaaaacatagaaaataatctattactaaaacaccataaatgtaaaactagtatgcttggctgttaactctaaagatgttacttatgtctgtttttaaaacatgcatgtatttaacaattttatcatagtattgtcatggaaaaaataaatatattttcttacatcttaaaaaaaaaaaaaaaaaa

What is claimed is:

1. A method for cell-specific modulation of a target antigen comprising contacting a target cell having the target antigen on the surface of the target cell with:
a. a first multi-specific antigen-binding polypeptide comprising:
(i) a cell-specific antigen binding domain (C1) and
(ii) a target antigen binding domain (T1); and
b. a second multi-specific antigen-binding polypeptide comprising:
(i) a cell-specific antigen binding domain (C2) and
(ii) a target antigen binding domain (T2);
wherein C1 and C2 interact with the same cell-specific antigen, and the cell-specific antigen and the target antigen are on the same target cell.

2. The method according to claim 1, wherein C1 and C2 bind different epitopes on the cell-specific antigen.

3. The method according to claim 1, wherein T1 and T2 bind the same epitope on the target antigen.

4. The method according to claim 1, wherein the cell-specific antigen is a monomer on the cell surface.

5. The method according to claim 1, wherein the cell-specific antigen is composed of at least two polypeptide subunits on the cell surface.

6. The method according to claim 5, wherein the cell-specific antigen is a homodimer on the cell surface.

7. The method according to claim 1, wherein the target antigen is composed of at least two copies of the same polypeptide subunit on the cell surface.

8. The method according to claim 7, wherein the target antigen is a homodimer on the cell surface.

9. The method according to claim 1, wherein the target antigen is composed of at least two different polypeptide subunits on the cell surface.

10. The method according to claim 9, wherein the target antigen is a heterodimer on the cell surface.

11. The method according to claim 9, wherein the target antigen is a heterotrimer on the cell surface.

12. The method according to claim 1, wherein the first multi-specific antigen-binding polypeptide(s) further comprise(s):
(iii) a first multimerizing domain (M1) and optionally a second multimerizing domain (M2);
and the second multi-specific antigen-binding polypeptide further comprises
(iv) a first multimerizing domain (M3) and optionally a second multimerizing domain (M4).

13. The method according to claim 12, wherein at least one of M1, M2, M3 or M4 is a polypeptide comprising an immunoglobulin C_{H}2 domain or an immunoglobulin C_{H}3 domain.

14. The method according to claim 13, wherein at least one of M1, M2, M3 or M4 comprises an Fc domain of an immunoglobulin.

15. The method according to claim 1, wherein at least one of C1, C2, T1 or T2 comprises an epitope-binding domain selected from the group consisting of: (i) a Fab; (ii) an scFv; (iii) a dAb; (iv) a V_{H}/C_{H}1; (v) a V_{L}/C_{L}; and (vi) a domain antibody.

16. The method according to claim 15, wherein the epitope-binding domain is a Fab or an scFv.

17. The method according to claim 1, wherein at least one of the first and second multi-specific antigen-binding polypeptides is a bispecific antibody.

18. The method according to claim 17, wherein one of the antigen binding domains of at least one bispecific antibody has at least a two fold lower affinity for its target relative to the other antigen binding domain in the same bispecific antibody.

19. The method according to claim 1, wherein the cell surface density of the cell-specific antigen is lower than the cell surface density of the target antigen.

20. The method according to claim 1, wherein the first and second multi-specific antigen-binding polypeptides are present in excess relative to the target antigen.

21. The method according to claim 1, wherein the target antigen is a receptor and modulation is activation of the receptor.

22. The method according to claim 21, wherein activation of the receptor is ligand dependent.

23. The method according to claim 22, wherein activation of the receptor is ligand independent.

24. The method according to claim 1, wherein the target antigen is a receptor and modulation is inhibition of the receptor.

25. The method according to claim 1, wherein the cell-specific antigen and the target antigen form a complex on the surface of the cell.

26. The method according to claim 1, wherein at least one of C1 and C2 comprises a ligand or portion of a receptor that specifically binds the cell-specific antigen.

27. The method according to claim 1, wherein at least one of T1 and T2 comprises a ligand or portion of a receptor that specifically binds the target antigen.

28. A pharmaceutical composition for cell-specific modulation of a target antigen in a subject in need thereof, the pharmaceutical composition comprising a pharmaceutically acceptable diluent or carrier and an effective amount of:
a. a first multi-specific antigen-binding polypeptide comprising:
(i) a cell-specific antigen binding domain (C1) and
(ii) a target antigen binding domain (T1); and
b. a second multi-specific antigen-binding polypeptide comprising:
(i) a cell-specific antigen binding domain (C2) and
(ii) a target antigen binding domain (T2),
wherein C1 and C2 interact with the same cell-specific antigen and the cell-specific antigen and the target antigen are on the same target cell.

29. The pharmaceutical composition according to claim 28, wherein the subject is a mammal.

30. The pharmaceutical composition according to claim 29, wherein the mammal is a human.

31. The pharmaceutical composition according to claim 30, which is in a unit dosage form comprising both multi-specific antigen-binding polypeptides.

32. The pharmaceutical composition according to claim 31 in which the first multi-specific antigen-binding polypeptide is in a first unit dosage form and the second multi-specific antigen-binding polypeptide is in a second unit dosage form, separate from the first.

33. A kit for cell-specific modulation of a target antigen comprising, packaged together with instructions for their use:
a. a first multi-specific antigen-binding polypeptide comprising:
(i) a cell-specific antigen binding domain (C1) and
(ii) a target antigen binding domain (T1); and
b. a second multi-specific antigen-binding polypeptide comprising:
(i) a cell-specific antigen binding domain (C2) and
(ii) a target antigen binding domain (T2),
wherein C1 and C2 interact with the same cell-specific antigen, and the cell-specific antigen and the target antigen are on the same target cell.

34. A method for cell-specific modulation of a target antigen comprising contacting a target cell having the target antigen on the surface of the target cell with:
a. a first multi-specific antigen-binding polypeptide comprising:
(i) a cell-specific antigen binding domain (C1) and
(ii) a target antigen binding domain (T1);
b. a second multi-specific antigen-binding polypeptide comprising:
(i) a cell-specific antigen binding domain (C2) and
(ii) a target antigen binding domain (T2); and
c. an antigen-binding polypeptide comprising:
(i) a first cell-specific antigen binding domain (C3) and
(ii) a second cell-specific antigen binding domain (C4),
wherein the cell-specific antigens and the target antigen are on the same target cell, C1 and C3 interact with a first cell-specific antigen, and C2 and C4 interact with a second cell-specific antigen.
